United States Patent Application Publication US 2026/0058010 A1 - sequence listing, part 29

SEQ ID NO: 351 - DNA, 440687 bp, Homo sapiens
  source 1..440687: mol_type = genomic DNA
aaaagctccccatgtcccaggatcctgtacattcctaattctgtcacccatagccatcagcaaagtacaagggagattaatccaaagagaatagcagttaacatcccatagtgccgaacctgttcttagccgagagggactttaccgaagaggggcctctaacccgctaaatcttagaagggactctaactctcctaagtcgggcctctaaccagaggtcggtcaagcatccttgccttttattaagggggagcctttaaccacctctatcttaggagagactctaactccactaagctgggcctctaacccaatcccattctttacccaggtaccccaccacttacccaaagtcttccaatcagtgctgcagtctatttcctttgtgttagggggtgtctccccagtatcgtcccatcgttctccagaaatatgttagaggactccaatacttacccaaaggtagctgttgggtctaggtttctacactattgtcccttcggtggttgccagaaatatgttgcaggacagagaaatgtgttacaggaaaggggtcctgatgcagaccccaagagagggttcttggctcttgcgcaagaaagaattcagggtgagtctgcagtgcacagtgaaagcaagtttattaagaaagtaaaggaataaaagaatggctactccatagagcagccccgagggctgctggttgtccatttttatggttatctcttgatgatatgctaaacaaggggtgcattattcatgcctcccctttttagaccatatagggtaacttcctgaccttgccatggcatttgtaaactgtcatggcactggtgggagtgtggcagtgaggacgaccagaggtcaccctcgtcgctattttggttttggtgggctttggctggctcctttactgcaaactgttttatcagcaaggtctttatgccgtgtattttgtgctgaactcctatctcatcctgtgacttagaatgccttaaccgtctgggaatgcagcccagtaggtttcagtctcattttacccagctcctatttaacatggagttgctctggttcacacgcctctgacaaaactcctgggctcaagtgatccgcttgccttgccctcccaaagtgctgggtgggattgcaggtgtaagctacagtgcccggtctggggggcacctttaaaccaagtcccagcctttgcctgatcttgcagtagagctctggagcaaaattatatctgagtttgttcagacaagtcaactgggcttttatactcctgcaccagtgagtcactggctaaagtcaatccagaggggtataaacttctaagcactttcaattctgtgggtgcaggtgaagccaggccatggtttgagatgcaaagaagtggcctggtaggagtggggtggtggaggctgtttactgacagtgctcactacagtggaacaagaacctttattacttcccctcaatatattccgatttttctttttttgacaaaaatatttatttttccagtggagcctccctacctccagatgaactagttggaaatggaattgttatggtactgaatctacaaatggattgcactatgttccatgcaaagttgactttcctcccttccctttgccacatccttcagagtgcggcagtaaattcagaaagtatcatcagttgtgcagttgaatgcaaaggctgggaatgattgatctctcccattaaataaatgtttaaagaatgatatcaaaattttgagaaaagaactgcagttaattaaaacccaggaataatatgtctgcttaattaagattggagctccagtgaggatcttaaaataaactatactttggattgattcagataatcttttatttttgtttttgttttctttaaaagtggtatgtcaacatcacttcatttctacatttcagcgttctgtacatttcttaaaaggaaataagcaatgctcaatgtacaaagtaaaaacagaaaactagaaaaatctgaataaaatggagcaagttgccagaggtcatacagtacaaattagtaattagatgtcatctgaagtgcaataccactgctgtgatgatgagttaaggaatgaaataaaaatactctattttaaacaaacagtatatatatatttatatgtatattttttacagatagtagacccagtgatatctgcagtattgtaaaaacttatgtacaaataactttttttagacattacatatacatcagcaccgtagtaaaaacaaaaccaaaacaaaaccaccatattaaaatctacctattagttggtcccagtactgagcatttggaggaagcttttaaaagataatggagccccccacccctgtctgtctcacttccattagccacctccagtttctcatcattgcttatatatttatttcctgtacctttcaggaaaaggtaattatgttttgtgtcttctcatttgtttgtttgcttttttttggtttcatctctttgatccactcagtttccccagtggcatcactccccatttggggagttcagggtcaccctgctgccacctcttcggagagggcgcccagcccctgcctgggcttctcacccaccaggcacctctggccttacatcctgccccttcctgagcagctctacaaccccgggtacgcggagagcaagtcaaaggcaatgtttgcctgccgcctcctctccaaaaacacctctgcccccagctttccatggcaactcgccttctcaggactgagtgtggccagtccaaccccacaggctccgactcttccgtagtgatctgcctgggagtgcacagaaggcagccagcgtctaggacacggagggaggaggggacaggaaaaaagcacacgccactctcacttaggacgacaccgaagccacaagtcctccaaaagggggattgggaggggaggcaaggagccttgttgattccttctgacagatttcgcttagggcagatgtgcgtcaattgcagagaacaactgtacaggactttggaagaggactactttgcccatatgaaataaactacatctcctttctatccaaatttgtaaggtggagcaattgcttttttagctcctccacctctctgggattttatatttgtctttctgatgagtagggatgatgggaaaggtggatttttagagcatcactcccaggatttcgcccaaagggagcctgaaccagtgacctccaggccactccttcctggggatatcagaaatatcagatgtggctcacaaaaaaccgactcccaaacatcagagcagccctcttggttccaggcagatattcattcaacgctacacgttagagaaagaagactccagtgtcgcctttgcatttcaggcattgtctaagttcttcctgcatttatgtggactctgcccaaggctccctaaagacataagcttcacttcttggatagtctgtaaggagaagcaaggggaggctggtgtggaggcaaggaggaataaaggcagggctggagacaaaggctccaggctggcagacacacagggtccagtaggggtttccctgccctgcggccgccagaagtagatgtgacccacctggatgtatgggttttgtattgggcgccagcaggctccagccccacctggagggactgccaccaggggcaccagcagagggaagccgtcccaggactgccggatggaccctgctccaaactcagcctgctctccttgtgacagcagagcctttgcaattcctgagggtcatcatggggcaggagacagacagtcctgtaggatctgtggttgtctccttttgacaatctcactgttcttcgtgcctgccctccaaattcagtagcatgtctcaaagccttacatctctcggcacccagagttcagtgcatttccaacctgtgcacctggcctgtgcaaccacccagcctcttctgggggactcactctccctggctgaggctctgtctcttttgtgtctccaaagctgctgtctcccgacctggggcaggaggggctgaggatacctctcttgggtaatagtccctctcggctgaagcagctcctgctgggccaggcgatcacagggcatgctgggcagaggggctctggccggcttcatcttcccacctgctcctccgggtgtctccctctctcgcagccgggatctgcatggcgtctcatctcgattgctgtgtgaaaatcaggtgaaatgaggcctggtggggctgtggattggcacctggatcttccattgtcagccagctgcagttttgctcagtttacgtgggtcaaaaaaacaaaaaacaaggatgggtcaacatcctgtttctttttcactttttaagctttaaccactcgagttgtggatcttggggcctctcttgattaggggttaccaaacaattcatcaagctcctgcatccactcgtcccctggcccgcctttgatgatggagtccacaaggtctgcaccgtccgggaggccagggaaggaacccccagctccgtcgccactgtaattgtatgacacgtcctgaggggcattccgctcataggcttggctctggctgcttggagcaaagctgccactgggtatctgctgctgtgctgggggctggctgaacgctggcatgcctgggactccctggctcaggccagacatgaccattggcctcgcctggctggtgccttgctgccccgggagcgatggcatcatctgccgacccatggcagctgggttgagggtcctcactgtgcccgtgttagcatccacgactgactggctcagtccctgtgggaagtgctgcttggtcagtctcggctgcccagcttgaagagggtagctggcgccattgttgaatggtcccaattctccactagtcctcccaggcatgccctgcaagctcctctgttgccagctttgtgctccttgctggactgttcccataaggctctgcagccttggaggggcttggggcctaggcaaggcctggcctactggccctttcatctgtggatgttgctgggtaatggctgagttcaccagcatgctctgaccaaagccactcaccattccaaccccctgcccagaggcaggttgcctcggtccctgggcttggttatgtgtgatgctcatgccactttggtttggatgctgcaacatttgggtcatgcctgtgctcatattgtacattcctggttggctggtaggcgtggtgctataaggggccagtcccatctccgactgcgcagctgcggtggccatcgtcccagggttctgggagggtcctattcccatcatgcctgcgttctgtgccatcagccgtgacgttcgcatgctctggagggctgcttggcttcttacggctgctatatcctggggagaacctgcagtgaaaaagaggacacataccactcactcttctccataagcaatatactgcaacaagatgttggaattttctttgggaatgacaaaattcctttatatgaaaggatctactctgataataaatctgtaacaaaaatgattatttttctgattatagcatatgctgattgtgaaaattttgaaagtgttaaaaaatacagagacaaaaattaaagtcacctgaaatcccactatccagagatgatcattcctattcttttatttgtatataaatagacacccacaaaaattgggatcgtactgtgcatgtgtttttgtagctgacttttccactaaacagatcctgatgtaattcttgtttatacttcagaagcaaattatttcgtactcttataggtatgacatcatcctcaaccaataagatactattttctttggaggtgagagagaatccacctctggggctaaattagaaagaaatggctgatcactttgtattttctatttgtgaagtggaacatggttcagtagagaatactatcaataaagaccattagactaatttcccttaagacttgagtaggatttgagaggttaaaggccactgcttctgctaagcagctattttgacagataggacatttttcggatccactctgtagatttcaacatgctccagattctctgaatcataacttgtcattgcaaactggccagcttcctgagctagaaaaagaaatcatcctgctacgtgcgacttggccataaactttacgcatttctacagcaaagtccattccttcaaatcggcaacgactatttctctcagcaaattgctaacacaattttaataatgctgtttaaaaggtggccagagtgtccataccaagtcattcaaccttaattaggcatttgagtgagtccttctttacatgttaccaggaaatttccaaacagccaagggaatggaaatgtcgccagtagaacaccagtcaacgttgcaaaggtctaggaggtacacaaaaacggatttttctatgtccctgctaatgattgagtctatgagaagaagaaaaatagtttttttcctggacatttaaagaaggtgcagcatgggagccagtcaatattctaagcaaatttgatcccacctggaactgtgatgagaaaccagatgagaatagtctaaccttgttaaacctggcaccctggtagataactgaagcatgtttttgtcttcctgatgtggctattgatttctgggctgcaaatatgtctccatagtttcttcctttctttaagaaagaaaattactggaattttgattatgtctcaagtttttgtggcttgagatcaatatcatactgcattgaaaaatgaaacgatttctatcaggaaacctgaaagatctgggggaaatccctagaaatgttttcatatatttttttaagcttcattatatctaagtgattttttgaaaaatcgaaagttcctagtaaaacactggaaggtagtatatactgcaacttgtaatattgtcatgcagttttgtgaccttaacgactaaatttttatcggctgcatggccaataagatcaactgtggtgaaatgggttattgagttgtttataaaaaaagtttaagggaaaaatattgctgagtcagagattgattggatagacccaaattatataaacagtctgatgggctgctagaaatagatgaaaggacatctataatttggccattttggggtatatttataatggatatggtaaaggactagatactgtctggaataattttgtgaatgagaaataggttcctttctttagagggcagaagcgttacaatgctttttaataggcagtgatacattaatccaagccaacctttattttttatttagtgtaaatgactgcactatcttgatgtaattcttatttttaaaaggcattttaaaatcagcaattgccacattctttttcacctaagggaaataaaaggacttttattaatctagttttatgccttccgtgattttaaatatacaaaggaaaaaaattcagatgtgtccaaggaattaacttgtctttacatgattactacatgtgttaaacaacagattatgttttctttttctttttttggtctaaagcagatattattgtgagacactgtaatctaattttcttgtctgctggttaacatcacaatgtccaagaaaatcttgtatattcaaatacagatgatagtatccaactttttcctaaaaaagtctatgttctattttcactcacaagaagcctgtatttgtgaaaaaaataagtatttccccatagtcatgtaacattgcccagagatccagaacctaatgagggaaagacagtcattaagacctttgaaatgtataatggtgagagtatgggataggttctcatgcaagttatacctaacaaaacttctctccaagaatgatatttcttatttttcagtttgctattttcccagatgcataacatcatgctatctagggtgtctgtaaacacatgaaaatactgaagatagtaaaacaaattatatatctcaaaccaatcagttcaaggaccctaaaatgtcacactggctttactgatagtattctctactgaaccgtgttccacgtcacgaatagaaaatgcaaagtgatcagccatttctttctaatttagccccaaaggtgaattctctctcacctccaaagaaaatagtatcttattggttgaggatgatatcatatctatatgagtgcgaaataatttgcttctgaagtataaacaagaattacatcaggatctgttaagtggaaaagtcagcttcaaaaacccatgtacagtacaatcccaatttttgtgggtgtctatttatatagaaacaaaagaataggattgatcatctctggatggtgggatttcaggtgactttaatttttgtctctggttttttttgtttcttttttctgggacacagttttgctcttgttgcccaggctggagtgcaatggcacgatcttggctcaccacaacctctgcctcctgagttcaagcaattctcctgccccagcctccggagtagctgggattacaggcatgcgccactatgcctggctaattttttgtatttttagtagagacggggtttctccatgttggtcaggctggtctcgaactcccgacctcaggtgaactgcccgcctcggcctcccaacgtgctgggattacaggagtgagcaactgcacctgcctggaatagaagtttttaactggacccaaaacattcagaatagctcatatgtgtctatgttctgtaacacaggggaattattaaataattccccttttcccccacaaataatacatgagttatgaacctggaaaactcaagagacattatgctgggtttatcagcttttatgtttttaattagttcataatataatgcagcagctctcaagcgtggttccctagctagcaaaatcagtgactcctgggaacttgtaaaaaatgcagattctcaagccccgcttcagatttactgaatcagaaacactgtgtatgttttaacaagctccgctggtgctttcagtgcaggctaaagtttgagaactacagatacaaaggagggctctgtatctgcaacaacaactatgtaatgatgactagtccccactcttccgaagctacccatggcaaaattagaaacataattcttcaaaaaccactggcactgatttagtgcacagaacacctgtggataactcaattccttttgtccttccctgtgtcaaggccaaaggatctaatgtgatataagcattccagaggtggaagggagtggtagctactcaagacccagtatttttacaggtgatcttcaatgtgatctgtcagtaaatatcaatggctttcagactgtaaactacagctcacagttcatgatctaggatatatacatgtgggtttaaaacagaaagaaaagtttctgatatgctctggtaatttctgttgtatttcattttgaaaatgttggttgtgacccactaagttgtttccaataaccttgtgtgttgcaatctgagaagttaaaaatgctaccttagatcagaaaattttcacccagtctattgataaagttcagggatacttgtgaaattatataaaagtttgtatatatttacatattatatgtttctctgcaagaggcttcatagctttttgcagacacttaaaggaataggtaacttttgagaagctaggacacattgatctagatcccacaaaatgggcagaggatgggattaggatttctgctgctaggtgacccctgtagccccctgaaaactcctgtggataagattaggaaggctcctcaggctattttcttcaccccatataagaccctcaagggtctttttttttttttttttgagacagagtctcgctctgttgcccaggctggagtagctcactgcaacctccacctcccgggttcaagcgattcttgtgcctcaacctcctaagtaactgagattacaggtatgcatcaccactcctggctaattttttgcatttttagagagacagggttttgctatgttggccaggctggtcttgaactcctggcctcaagtgatccgtccacctcagcctcccaaagtgctaggattataggcgtgagccaccgcacccggccaagggctctctctattagagatggaagggtttgatatttgaacgggccttccacatttataaaggagtgccaacactgacatacagtgcgcccactgctactaggtcatgatttaggattcccgcaaacggctacaggatcagttcaatcagcctcaaggccctatttgtcttctacattcaaaagagactagtggttgttgcaagccagattcttccacttcagctttagaggtaagggctttggtcaggtgacctgctgggataagcaaaaaagatgtggcacaagatttttgcccctgtagtcactaagatgacgatctaaacataaacaaaattgatatgcagccaacaggcaccagtatatctttactggttgttaaactattacaatactatgtacctttggtaaagaacagctgttctagtcccaactccgacagctaccctgacccttccctgtgccttctagaacctctctgtgactcagtgaccaaaaggttaatgcctggcacaacaggaggcctctaggaatccattctgattggttagtactcttaacctaccagtagttacatattttgagtatttcctggacacaaatacagccagtaaggcaatgcctctggctacacattcacttacgcttcaccactggaaggtataaaatgagagaggttgcactggcctcaccttgaaactgattgacctgctgcactgggtatggattccgctgtggctggaggtgctgccggggtagatgtgattgctgcaactgctagaacaacagaacacaagaggggtggagaggtgagatagggagcaagcacacaattcaatatcccagcagttccgaggaaggtagtgttttccccaaaactaaactttgtgttgaagaatcatatgcatacaggcaagtgcacaaagtctaaggatagagtcaggtaggttttcacaaaacgaacacactcagggccaccagcccccacatcaagaaacagaacgctgccaggagcccctcgtgccccttccagtcatcactctcccttgacccatgggcatcactgtcctaacttttaacaacatagagcagttatgtctgcttttgtactttgcagaaaaggattcacatgatgctgcttttgtgtctggcttcttgcattcaccactgtatttgtgagattcatccacgtggatgtgaattcttgttgcttgttcattctcactgttggatagtattccatcatatgaatataccataatttatttacccattctactagtgatgtcacctttggtgtttctagtttttgtgtttcaaatgtgactgctatgaacattcctgtacatgcctttggtgaacatctgtatgtatttctgatgtgtggacttgctggctcatgaggaatgcgtgctgagggaaggggttttgacatggactgcccaacatcagcctgcatgctttccttaggctgtggggactgagttgaaagggacaagcaactgctttttaatgacctaagtggatgctttgggcataggaagatgacatcctcaggagttatacaaaaaaggctaatcttattcccatgaagccacactgcctgtaaaatacatctctacatgtaaactattcagcatttactgctttgaggaaaccatgtgggattccacatataccagcagaccaggaggcctgcatattagtctttcttcttccactcacggggatgctgcactgctagtgttgctaccaatatgctgggaaggctattatcattatcatgctgtatgtgcaaagggaaagaaaataagagtgatgtagaaagagcagagaaagaggtttcagttctaggtctgccgtcaagtagcttgcgtgaccttggggatgttgtttaacctgctccctgcagctgctgaatattcattaagcacctttcatctgcaagggctataaagaatatacaacaaggtccctgttctttagagtgttcattataaaaataacacacactgaccacctcttaacgcctgtgtttatttcaattttttctcttgtgtttgttcctgggctgctctataattttcttttctttttctctttctctacaaggccagccagtattctggcaaccaaagaaaaaacagcctctgactcgttgaccccatcccatggttcctaccataatgttctacagaaaactgttgaaattaattgattgtgtagaccattaaagtgtagacaagaaaccacacaaatcttttaggcagcaatagaagggcattactgagagtaagctgagcatttaacagcttctcctcagtcaaacttcccatataatataagaatttaactgtcccacttacgactaggaatgagcccctggcagcctgtgggggactgagggtgtatcctggagtcaggaatcaggagtcctcagttccatcctggctctgtctctctctagctctgtgatctcatataaatcacataagctcagtttccccacataacctcagttcctcatttgtaaaatgatgggacttcatgatgtagaatgtttctaagttctgtctaacctttgtgaatggatgagaggttatgtgctttgaacttttggagaatacggcattaaatgtgaattcatgcctactttcaacctgcactgctctgattgccaagtctactgagaatcattttaaagtttcccaaaatatgtaagatcccaaatccttctgttttccctcacatgtcctttcaggaaacccaaaatctgtttccaaaatccaaagtgtgaggacactttcaatgctgcagcaaccaagattggtgttgatctggcagtattcactctcaaaacgaaaaactgagagctggccgggtgccgtggctcacacctgtaaccccagcactttgggaggccgaggcaggcagattgcttgagcccaggagttcgagaccagcctggccaacatggtgaaaccccatctctactaaaatacaaaaattagccaggcgtgatggtgtttgcctgtggtcccagctattctggaggctgaggtgggaagattgcttgagctcatcaggcagaggttgtagtgagccgagatcatgccactgcactccagcctgggtgacaaagtgagaccctgtctcaaaacaaaacaaacaaaaaaaagttgagcacttactccttgtagacctgcacttggacaacctgcactaaatctgcaccctcctcaggtacaggcaagacgctccactgacctggctgggccatgtggctgcagctctcacatgacattcgctgacaccagggccacgtgacaggcccccacatacatgtgtgcagcacatacagcttccaaaacattttatacacatgatcttatgtgatccttaaagcagctacatgaggtgggctgggaaattattaaaacctaatctggcagatgaagagggaagttagtggtttttccaaaatcacatcacatgcaaaagaacggacaaatcttggccctgaggaaagtgatcctcccctcatccctcatcatcttttggtacacacagttgctacggaatgatccacaggtcacggcttcccatttcccttgtctttcccaagaagccccagctctctccatgctctggattctgaggggtctcccctgacctctcacctccttgtctgggggcatcatcttgacgtgtctcttctcacactcttcccacaccctgtgctccccagggtcgggctggcctcaccgtgtgggaacacccttgggctgcacagctgagctctgcctgcttgccctgggccttctttgtgtctttggtcacagcacacatatcaaaagccatcactcaaaacatcaggcacacctgagatttcctgggattggctgaggagaggatttacagagcccagctgccctcggcagctccatttgtcactgcctgagagagattagcatggctccttgtcgcacaccttatgtaggtgagagggatagaggtttgtttgtacaatagctgccaggcggctgactgaccttggtaaaaagggagataattacacagctgttcaggaacaaaagcaaaaaaaaaaaaaaaaaaaaaaagggaacataagtgaactgtgctcagcagtacaatttttctctttgggggatgcctggtgttactttgaactgctattcttggttaatagggacctccatgggcccgtgtcctacacaggatacacggtggtggatgcttagtaaatttgcaaaattctggcagggcgtggtggctcacatctgtaatcctagcactttgggaggctgagatgggaggatcgcttgaggccagaagttcgagaccagcctggtcaacatagtgcgaccccgtctctatttctttaagaaaaaattcataaaattctgaccctatcaggaatattctagaaggataactgtgaggcagacttatgttgggccttcagctttatatgacaacctcacacctcctataagaaagagcctgctgtgcaagattctctgtgcagaccctcacagaagccgcctggggatctcttgtggacagcctcaggcctttccctaggataatgctaagtcaggtatgggcatctctaaaaacaaaacaaattgaaatctacagtagcagtctgcagggaaggctttctctcaaagctgaggaattatagggcgagggtggacaaagatgcttaaggtaaagctgtatttgtgttaggctttcctttaactcacagatttcctgagctgttttaaaagctgtggggagttttcttaagtttgcaccctgtgtgtgacccagagttcaggtttccaggtagttctgcaggccttattattctgctattgttcctgatccattgttcattacccattctatagaattcttctcaattcctcttcctgtcaatttcctctaagaaacagagttctctgaattattatttttttcttcaagctagaaatattacggcttatggagcatgtgagacagtccccgccatgtgctgattacacagacccctgtaccagaaatcagaaggaaaggagtcagacttgaatcaaagaaatgtctctggcacacaggccttcaaattgatggctggagcctgtcttttaagaacaaattaattcattataggaaaaaccctaactaattgaaaggtctaaattcttcaggttctcttgtgatcctgggaaatgctagaccgtgagcatcttgatggaggatgtgaactgccacttcctcacaggcagcaggcaggtgctgaataagtgcttgctgaatgaatgaatgaatcacgccaaggggcatgttacctgttccgccaaaatctgctgctgctgctgctgctgctgctgcctttgctcccgcaggaactgttgcttctgctgctctatcaactgggcccgctgatcaatgagcatctgcttcatgatggctgcttggggctggctgcccaggaagccggggcctgcgggactggctcctgagaccatgccacctgagcctgggggcacggaggactgcatggggcctgtggttcggggaagtccaactggatgctgctcctgggaagacaagagagagggagatgcagggattccccatagagactcactgctgtttgaagggaagcccctggaaaaagggaacggggcagaagtcccagcttatggactggagggtttttgagtggcacgcattgcatttccataaacgtagcttcaaacccgaccttacctgagtagaatgagagaggccacaagggacagtaagagagcatggctctgggaagtccaaggccaagtccagtctgtttcggatgggactgactattgcatatagactggattttcaactaacatcctgtgttcctccaaggaaagggaataagccctcaggctgagctcacctaaagtctggaacacgagacacatcctgacctcacctgttaatccttatttcttactgtctacttggccaaaatggacgtcttctttgcaagtaggagggacatttgcagaaaactgcaggaatttgttaatcaacagatctgatatttgatggaattctaacgagttgcaacatttgagagcttagatatatgtcagaaagaaaaatcctcctggccagagttgttgatggtgagaactgggaatgttttacaccgatcaaagctatgtaatctcctaatatttttaaaaatagaattgagtcggccgggcgcggtgtctcacgcctgtaatcccagtactttgggaggcccagtactttgggtggatcacgaggtcagttcgagaccagcttggccaagatggtgaaaccctgtctctactaaaaaaaaaaaaaaaaaaaaaaaaaaaaaaaaattagccagacatggtggtgggcacctgtaatcccagctactcgggaagctaaggcagagaattgcttgaacccgggaggcggaggttgcagtgagccgaggtcgcgccactgctttccagcctgggcgacagagtgagactctttctcaaaaaaaaagaattgagtcttctatgtctgggataatttaaacatggggtgttggattgggtctcttgattctataattatatgtcagccagtcgaatgatggcaacttttaaggactggtccttagggaagaggaggtcaagtggtaaagacctaattccacacagcccaggtgactacatggagaatgtgctcaaaggcgaagtttatgctctgagctggacagtgtagactattaggggaaaacagtgaatgggaagaaaaggtgtgtggcccagattcaatttctagacacttcctttcctattttttctaccaagactacctagcagtggcaagtatgttctgaacattctgcagaaattccttctacctcactgaagtttcaagtaattaatgtgaaatggaggagttgacacagattaaatgggcacacatataaggacattcacagtcattttgtgaagcactattatgagacctaaatagcaagaagcaaatgtgaataactctgtcatttaaaaatttttaaatccaaattggattttaacatttttcttctttttactttattgcctttccaatgcagataccgttaaacatattggcagttttttctcaaagcaaataggtgaagtttctctctgtctctcctagagagaccgtcctggatttgattccctatggcttgggcttgtgttcctcccttccttctgtggtgtgctgtagaaccatgcaggcttccctctccactatgactgacttcaactgcatcttcagttgctcttcttccctccaaacaaaacaaaacagcaaagcaaacaaaagccaaaccaaaccaaaacgctactcctcttaccctagaaacaatcacccaagaagctctggtttgttcgtgcagtagcttaggtcacacaatcaatgaatggaagacacagaactagcagaactagaacgctattttttttttttttgtaacagatagcttgtctttacttttttaaaaaatgtaacttaaaattaaaaaaaaaatttccataagttatcggggtacaggtggtatttggttacatgagtaagcagaacgctgattttgattctcaattcagtattcctactagctcaggcctctcccaggcagtgtcttcatggtgttaagtgtgcacctaagaacagcctgtagacctatatactgtgtctctcataagtgtactgcgttctattttttatgtgtaaatgctgtagctgaaattaataaaatgttttgcctttgtgtattttctctataaatacacaaagacagctaggaaatatttttgatgttaataaaaagatcttacactaaaaaatgccaggaacctttgtgctaccaaaaagtttacttcaggactaacccttgcaggggcctagatatttcagggtcttcccttttcccccaaatatttgctacctgttttccaagcccttccttccagtgaaataaagctgtttcttggcacctttagggacaaatggctgattggctttacactttaacaaatgaattcacactgacatataaacagccaatcagcaaaaatgcagatatgtagtttgttttttctgtctcagtatatttgatactttccagttttgataaggaggagagagttggaaagaaaatgaggcccaagggaagataaagttttcttcagcttgattttttgagagggttggtctgggatggccctgtttatctttgtgcactttgagatatgcttgtcctgtgtgaccagcccgcacagctggggaagtggtaaggagtgaagaagtgttgctttcccagcctcctctccactgggaaaagaaagagagaggcaaatggggtgacgacgatacatcaaaccactttttgcccgtgtcttcctgggccaagaagaaatacttcaaaagcacagtgtgaaaaaaaaaaaaaaaaaaccctcccaaagggataggattatgtatttccccaaataattccctcccagaggttttgccttcaggcttctcactgaagacctacaggcaggaagggctgtatgtattattttatgattattttttagagacagggtttcactccgttgcccaggctggggtgcagtggtatgatcatagctcactgcaacctccaactcctgggctcaagcaatcttcctgcctcagcctcctgggtaggtgggggactacaggtttaagccaccatgccctgctaatttttaaattctttgtatagatgggttgttgcccatctgtgttgcccaagctggtcttgaactcctggcctcaaacaatcctcctgccttggcctcccaaaatgttgggattacaagcatgagccactgctcccagccactatgtgcattcttaaaggactgccttccatacgaaacatctttagttcgcaacaaagctctgcggcattcaacagtggatgagagacacctacagcccccgactctgaggtgtattccaaagtgtgaaaatgtactcagtgacttgacttacacattaagctggccgaggccactaacataatacatggcttcttttaacctccagtctcagagggcttaatgagaaatagtctgtcaaatttcaggatttcaagccactgctcttgtttctaagaaggacacacactgtgttgtgcaattagagaaaaccaggctgagctttcgtcatgcgagatgtaatgccttgaagccaaatgatgcagtatttttagttgtaattactggcttgttctccaatccactccttgcccaacgacctcccttgcttctcccaagaatcttaatacagtttcttcccctcaaaaatccaactgtggctacatagatcttcactactcgcccaaccctctgactcttcagtaaaataaagggaggagaaagaaatcaaaaccaacgaacctattttacatatcttcccctccagggaaaagatcttagcaattttctaaaggctagagtgaggtaggaggtgtcaaaagcacccttacctcccccaaacaggcagttttcgacttcaaaaaacagttgtggtaaaaatatctcccaagaacagccagctgtttatttataaatctgtgcgtagggaagctttatttttctgaagtgttttcaagaacatgcatagtgtttgggtgagaggggccagccttgctggcggcgaaccaaagagcagggaatcacaaaagacggccggcggcgagcaggctggggtgacggggaccccgtggataacgggcttgaggacgcccagggcttcagccttttccaggcgtccctcgccggggcaacgcagagcagctgccgttcttcccgcgccccagcagatggtggtgtcagcccggcctcgtgcccggccgccgctgcgcccgcgccccctcccctcgcagatggcttaatcagggctcccgcccgcccctccgcggcccccgccccgcgcgtctgggcgagcgctgcgaacgtggagccaggcagtcaagtgttactgcgtacagcaggtagcctggcaactgagagcacaataccgagcagatggtgttcgcacggcgtgatggacatcacacacgacagcctgagacaatccaggaattccctggtgactcgaggccctctttgcacaaaatgagttctctctccattgccgtgtatctctggggttatctgcccccctcctccgactgacactgaactggtttctcattaccgacttttcttccagccggaggggaggaagaattcaagtgggggagggcgcgggaaggggacgtggagggaaacggaagggctgggagtggggtaggggggcagtggcgacctccggggggggagggtggcggacaccagaccccagggccgacagcccgggagggaccgggttccaggaccccagctgcacaaagccggcccggggagggggcgataaggagcgagcctcgggtcggcccggcaccgctgcttcggctcagagtccttgcaatcgcttggcctacgaacaacctaaatgaaatttagggttttattgaaaaagtcccctggggcctaatttagcctctcgactccagcctatatgcttacaagtcctcaggggactccggctaggaagtcaggagtggggcccgtgcgtccccggcaggacctagactgcctctcggcgcaggcggccctaacaaagaagcccacgaggcggtcccgggcgcgggcaggggcggtgcggcggcgctcgggagacccgcgaggggccctggaggtcctcggcccgcgcgcgccgctcgggagcccgcgaggctgcggtgtgctccagcgggcgcatttcccaggccccgccacatcgtgtgtgttagtggctgggaaggacacgaggacagagatgaggattgttcgtggcaggaaagagtaaaaataaatcaatgcataaacaaaaaggatgccccagaaaacctgtgcttttcagacacacacacacatacacacacactcactcactcactcactctgaattgggtcaagtaaaaaaaaattttttttaaaggaaggaatctttagcccaactgggatttcgacgaaattgtatatatcaaaagatagctacatccaacctctcaccagaatccagaggctttctcctgcaaagatactattgaaagttttattagtaagtttgagaaggcgaaagtatgtatcagaggtgaaagctaacatgacaattgcttggccaaagagcgcagcagttttatgttattgagcagcacaggatgaatcgaacacccacgatggctagacagaggcgcctggctgtgactcccagaggttcaggcaagccatctgacctctctcagtccccaccccctgaaatgaaaaccatactcataagactccttgacaatggaaattttggaggtgacatagttaatgaagtgtcatagaaaggaaatagctaagaatactctaaaacctccccattcccagtatgggcaatttgggaaaaatgagtaactaaaaattaggggttctcaaagtgtggttccaggatcaaatgcattagtccccacctgggagcttgttagaaatgcaaattcccaggctcccctctaggcctcctgaattagaacttttgggggtgttttaacaagctctccaggtggttacgatgtcccatagagaatcattggggcaaataatcctgtgccctgattagattgcaaagctgcactttcaaaagcaagtcagggtgctgagttgcttagtttctattgcaaaatttcctgctttggaacaaaattttcaaaattttcagagggttgctcaggccagtgatgtttgcaatgcaaacccaagaattctgaaaggagcccatggctgaaaggagccaattcttccaggacggactactccagttgcaactgtgctgtggaggctgaggagcatccatgactgaggaagggcgagtcccctataatgcccttgctaaggggagcatcagacatccctagacttacaagtccctcgtgtaataaggtgaactatggaaagctatgatttgaggaaagttccctctgattgaaagagttcttcaaatatgaagaatgtaacacttatggggcacctactcattgcaaaacactctactaggggctttcacctgtatgtttaactcattttgttgattttttttttttaagcccaaatttctgagaggttaaggaacttgtctggtggtggcgtctctgggattctgacttttccactgaccataacatgcatctggtctaaattgagcggaccacccaggaggatgttggaataaaaagaaatgggaagggggtggggagaggaatgggcatagaataaaaaggtagaaacccttgggatcaaaggatgcaactgaaagagcaccaaaatatgcatcattttttttaatatgttgtctggtacccaaaattgggatgcctctgtggtatcaactttgacatttaaagaaagggcataagattagatcattcaaccataagtggaaggaagaaacaaaataaaataaaaccttacaattccctttgaagttgatcaggtgtcaaggcagtgatttggttttcttttacaaactttctttttccagaaaaatttttactgtgggtttggagaggtgtttacaataaattcatagcagagctccaaaagggcccaccccatctaatatcctctgtctcagcagattattgaagaagattggattaaaaggtttgttttgtgatgtgtgatggttgtgtccccaagatgattgagtttgaggcagagttcatcaatttaggaggcttatcactgaagcagcaataacttggggcccaatgcgaaggctgctaaatgggtccagcaaagctcttggttcagcttctagaaaggaacagtgtacattgggggaaccccacaggcctgggtagaaactcagctccaccatgggcccagtgactggcacataacaaacagcttgtggttgttattcttactgccgaaacctcttgatcatgcagggcatccttcagggtgagggaagtgctgtgtttctggtgctagctttagctcctaaaataaaggggaacaagacttgtcatggtcaggccaggcatggtggctcacgcctgtaatcccagcactttgagaggctaaggcgggtggatcacctgaggtcaggagatcaagaccagcctggccaacatggtgaaaccccatctctactaaaatacaaaaattagctgggcttggtggcgtgtgcctgtagtcccagttactcaggaggctgaggcaggagaattgcttgaacctgggaggcggaggttgcagtgagccgagattgcaccactgcactccagcctgggcacaatacagcgacactctgtctcaaacaaacaaaaaaaaggtcttggtccccattattttaggagctaaatgcttaattgatagggcaattacttaaaaaatatacattttgccgattccttcctctgctgcccaattgctggggaacatttgaaaaacaatgcagaaaagtatagatagaaaaaaaggtacagagaaaaaaaaatgcagaaaagtatagatagaaaaaaagtatacagaaaaaagctaacactcattttttacactcaaaggtaaccactgttaatattttgatgtgtttttatatttcctcctagttttatcccagatgcaataacatatttttatgcttatgatcatggtatatacacaattacacacacctactgattcttaactaagtaacatgggagaggtagaagcttctaactttccaagtgcttccaagtgatcatttcctggcaggatgatatccttatggcatccttcctggcaaggcttttaagctcctttgggaccaagactatgagtcttcccagtatccagcacagagctagggccacagctgcagcaaaatacagatttactgaactcaactgactaattggctgggatgaattctagcctaaaccaacatcaggtataactggagatgacaaaatgatggccctataatggacagcttctccgagctcctgagctgaccctctgctgaatgttaaagaaagggttaaagttggcagtccagtgctaaatgtgagaatgccaccagccacaggaaggtcagcctttcaaggcccttttttgcagggataaaagcaacaaaaataccatttgtccttatcagtgctttgaacatagttaccataagtccctccaatggaaacacaactttgagagttatgcttttcgtctgcctttgatgtaagttatagagtccttttgatccctttcttgtgattaattccaccaccaaagcaattctacattggttaaaagttcattagtgtacaacaatagaagcttgattaaataaattatggtacatccataccatgaatactaggcagccaataaaaatcatgcctccttagactatctaatcacataggaaaaagcttaccatatatagttaagaaaggcaggggaggaaagcagtttttttttttttttcttttatgtcctcaggtgttaaaactaaaaaaaaaaaaagaaaaaagcagtttctaaaaacactagccactggatagtcttgttagacaagaattataagggatttttatttttatactttttcaaattttatattatgaatatatattacttttagtattatttttaaaagcttgttaagaataaggctaaactattatggaatgaaatgtagagttcaagaggggcccaggttatgtctgggacctggactatttctccctgagcccaccttacgctctagagggtgtaacagacatgcttaagtggcaggtccccttttaaaacctgtacatggcttccacaactgggcttggatacaggttcagcaactaggtcggctttacattgctgccacaaagagctcctaagtcccagaggaagggtactgaccatcttccaagaattctttggtctacctggacaagcctgctctctgtggcaccacccagctctctgtggcttttctctgtcttaggcttgaagccacagtgcatggccagaaccagccagacctttggagttcaagaactcgagaggtgggtgaaaactgccattgcctccacagactgtcttctccgtggaaagaagacctgagtcaccagggctgggaaacctgcaccactgagacgagcacagcctctgccggcatgcaagtggccgctgtcaggacacatggactgaaagtggtttgtcagctgctccattaggttttttttacccatatgtttgctacctttctttccttgatttaaaaatagggagggggagcagtctcagctgtcttcagctgctagggagatttttttccccctcctgagctactgtttcccccaacccgagcctttctctcttattgtacccaccctttctgatgaagtcatcaaagcaaagattgcataactgatgcataggcctatcttgtgttatactgggagacaggccaatgtttccattaatagacaagagcaccaccacgctgccaaatggagctctctgctgcaaccactacaagacaggaagaagggaagggaagggaagctgagtgctcagggcatgctgtggagggaaggcgagggcacttcccgccgtcatctccagaaccgccacagccttgggaggggggctgagagagatcagtgctgactgcctgagaagaggccttccacaagctgcctttctggtgtccccatgttcttccttccttccttccagaggccgtgagagggagggcccgtgtcagcctgctctgccggtttcccgactgctgaacctgtctgtgggaagctgggtttgactatgtgatgctgaggctctgagaggagggctacccttttccccaccctcggcccccattcctatgagtagaagcctgcccagctgcggtggtggggtttgaggaggctaggacttagagcagggaaaaacaaggaagcagaatgaaaaacagaaacacttagaaatctgggattggtacttctccttatgtaaagattgtggctgacgaccagcttcttagaggaagcaagtctaggagaagggctcatacctggtccgtgagggcctatgggggatcagggcataagaccacctgaccctgggccttgcatccacaagaaccttgagtttagatttttagacatattcttcgaacaaggttttacatatatagtcactgagaaatcctgagaggattgaaaaatagcatctattttacagctttaaattgtgccctgagctgagcgtggtggctcatgcctgtaatcccagcactttgggaggctgaggtgggaggattgcttgagttcagttcaggaccagcctgggcaacagcaagacctcatctctactaaaaataaaaaaattagctgggcatggtggtgtgcacctgtagtcccaattactcaggaggctgaggtgggaggatcgcttgagcctgggaggttgaggctgcagtgagctgtgattgtgccactgcactccagcttgggtgacagagtgagaccctgtctcaaaaaaaattctgccctgttattagatcgggctgctctaagtccattatcaattaacattctttatatgtcctgtgtttatcttgtgcacggtataattgccctatgctgtattttttaaaataaaaacattgcatttttaaaacgccctattgtcatttcttcattttgtaaatatacctgggcactccaaaaaatagaaatggctcaggtattttcttaaccttgaaagacttggagacacacgggcataaaaataagttttagaaagaatatagcactcaaagaggtctaacacagcccttgactccacgccacacatacacatggtaacctggataaaggaatctggaaacaatgagaaatcatcctctctacagatcttaaacttttcttttcttttctttttttttttttttttgagagagagtctcgctctgtcagccaggctgaagtgcagtggcacaatctcggctcactgcaacctccgcctcccgggctcaagcaattcttctgcctcagcctccctagtagctgggattacaggcgtgtgccaccacgcccggctaatttttgtatttttagtagaggcagggtttcaccgtgttggccaggctggtctcaaactcctgaccccaggtaatctgcccgccttggcctcccaaagtgctgggactacaggcgagagccaccgcacctggccgtcttaaacttttcactctttaatcagaactcttcttgggaagcatgattcagcagtgcttggcttatagtaggcgctcataaaggtttgctcttagtatcgtccctattaataatgaggaagttagaaactttaggtggggcctatattttcagctcagattttgttggttcttaacggtcacatcagttcctcagctgtgtaaaggaaaacatccctgtttacaaatgaccacttttgcttaggataaaagttaagttggtagctaaatatgaaatgagaccctagaataaacattctttatacgtcttgtgtttatcctgtgcacagtataattgcccttgggaagttgatgggaaacttttagtgaggaataaatccacctttttgactataacaatagaggccttcaaagatggaggttatgcaccaagtattttttgccacctatcccttctaaaagcataaatatttttgcttaaacatctgggatgtagcaccagtttcctaatttctttccaccagaaactgaagccaagtctgacctccttaccatgatatcccctcaaatgcccactaccaccccctcatttttccccaaaagctttctggggtaatttctcctctagctagttgacttcatacccaccttcactctgcttcccagatccaggcaggctgctttacagcataaccacgattcacatatacacgtctccacctaaagttacacgcctcctttaagagctgctgcaaccattaccacttctctccaaggtgactgcttgtgggaggataacagcagaacaggaggggcagggtgattaatgctggagtaggacagggagatctaacctgctgttcaggagacttctcaacctgagaaagcttcccggacactagggatcctgtttctggtcttccttccctttggaccatttctctgatagacaccgtttcttgtactttggcccaaataattactttcccctttgtgtttctgtttccctttatcctctcccccattttaagaatacacaatttctcaatcagcaattattaaacctttctcaagtcaaccaaaccttttctggaagctgacactaaatatacatggctgtaaacttgctgaggagtggaggaggggtgagtggggatgacaaacctggaaactgaacttgaaatctgtctcagatcccaaggataccacacggggaaaagccagccagtgtgagattcctttctttattttccttaggttctcaggggataatttgtactgaaggttactttctatagaaagccttgagaacactacctcttaatcatatttagaagcatataaaaaaggtcgacaaggccaatcttgatttcttttttctttgatgtagtcacagagaattttgaaggaaagatggggtctctgagtccccattaataaataaaagtaagtcctcatgtacattcatgtacagggtgctgagagctcacatgtggaggggccatccctatggccatagagtcctgccatggtcattgtcactaacagttgtcactgctgtagcagggtcccagtcactcttagtacctctcagaggtttcttggggacacagcccaaatatatcctgtagtcagatgcacaaacaccttgggtaggaacctagagaggtctggaatactctgattcaccttctgctaagagacttagataaggaaggctgactaggtcagttaaattgattgccagggtggctgacctaatagaggttcagggatctggtttgagaacatggagcctcagacccttcccttcaagctgtgcagcattgcatatccttagtgtcattttcagtctcagcttccagatcttagagttgatttttcttaaagaacactcacagctaaaacaaacaaataaaacaaataagcaaacaacccacttgcttaatatgatataccaccccccaggagcatgggttgtggttatagctttgcttgggattttatgtggagtaagtcactgcatggctaacatgcaaatattgctcagaaaacaagtatacctccccctgaagtctgagcactagaacacaatgtgtggcgtgtatattttgctattaaagtttgctttcaatttgaatatgcatcccactttttgaaaaacttttattgctcaaggagtctgcacaggcccagtaccccagcacaatggcaggggctatggtgggactctcagactctcactgcagtgcagccacggcccctgtcctggagggagactgaaatcctagtgcagagacaaggtgcacttcacggaaaagctcaaagatgacaccagctggtcaagaggcaagctgtgtggcgtgtgttctgtttccattcgatttccatagagccaggctgaccagacccgggatgggcagagtggtggcatggcgtagaaataggcccaaatgtggatacaaggcacatgagttctaggcagtgtttgacctggggcaagtcactgaacatttctaagcttcagtattctcctttatgaaatgaggaagccagtccaggtaatctccaaggtttctactcgctctaacatttctctggttccacttggaaagagcttcatggattagcagggacttgactgagagccttgatggaagtgtagatttggatttgagtgagaagagaaggaaggaaggagagcggccacctgcaaggagggaggtggccacccaaagttggggtgtttgctgggatgtgtgagaggaaagcttcacagggtgggactggccatggacagatctgcatgcaggcagatccagccgactcgaccaccgtccatcaggagccacagcaggttcttaaagggaataaacgctaaatgcattactttaaggagattaagctagtgtcaggtaagctagtgtcagattagaacagggctggatctggagaaaagtgggcaggaagggttgggaggtagccatgggggtaatcccatcaggaggtgaggggaagctggctgagatttggcacttgactgtgggaactgaaaaaagccaaatgcacctgccaggcatattcctgcaagaataagaattctcatgtgcaaatatctggggtcattttccggtctgggatcccacctcctcccactcatttctcttctctattattgtgctctgcccagtccacatggctaccagaaacctggcagagatatagtgatccctgctttaaaatcaggtaaaaataatgctagtttttctggtcttccctatttttaaaaaactaaatttatttaaatgtgaatttagtatacaggattttaaacataccacctggtttttgacagggagtagaacagtaggtatatactgtgaatattttcaaagccctaacaatacatcctggggatggaggaaagatggcaggcagtaacaggaaatgtgaccacaacaacttggagaagaagaaaccttttagtttttgtgcttccttaacttgtttctccaactttctcctgctactaaatgtttcattcactcaacttttttcaagaagtcctgacaagtaataacgaaagttctatggtggcccaattaaagacttttcatgacaagtagacttcataacaaatgtgataactaaatatttcctaagcataagctctcagttggattttttattaaaaagtcagaaaatcactctcggtcttattgctaaatcttgtttgcaacagaaatggtatgttatatttttgtaagataattaacatggcatgtattccactaaccttttaaatctgaactagagatggtaataagaataatttctaacaaaataattcatcagtacacaaccagttggactgttgaaaatttatgattgaagttaagaataccttggtggtttcaggtaaaaacatgttttatatcaccaacttggagactgagtgtcttctctgaaaaaaatgaaaaatcttccctttaaaaattttcctaccccttatcaagacaacagaggagaagcagataccctggtccacaacactctgaaattaccactgggctctggaaaatggattgcttcacctatttgttctgtcttctaatcccagggaggggctgcaaatctccccatctgtctctctcgctctgcgggcccctcgttgccatggtctttcccacagtatctaaaggaacaagattccgcagacgtttgacactggacctccgcaggcagccaatttgttttcctttcacctccccccttctcctcctctctccctttctaatatagcatattctttctgtgcacccaccaaaagtaatgtgtcaaactatgattatgttttcttttatgaaacaagtagaagagagacggattgctttccttcctttgatcaagtaaaggtaataaaaagcctagggagaatcgggtgggagggggttgctggcgtctgctgtcctggactaggccagcttttgtcgggggttcatcttaagaaattgtgggccaccggccgtggctttccctcatggcccaaggcttgcagcaattgcttctcactgttcctgtgtttggaacctactgagtctgtgcagcccttagtggttttgtcttgtgctctgggaaaagcaaaggggttgaggatggagggaagccctgtcctcagaatgtgcagggaagtcaatccttaaatgatggtttctgtagggtggaaataccagtctatttgaacccttaaagcttataccaaatccacaccttctgcatcactgaggaaggaaatgtaacttgagagtttgtggcgccggtgggaggagggagaagagtgcagagcgcgggcaactttcccccaccttttagacagaaacttttccttttagcatctgcatgcatctctttagttagagaatgaattctagggggaagaactttaaaaatgtcttccttgtaggtcgggcacagtggctcacgcctgtaatcccagcactttgggaggccgaggcaggtggatcacctgaggtctggagttcaagaccagcatggccaacatggtgaaaccccgtctctactaaaaatacaaaaattagccggctgtggtggtgtgtgcctgtaatcccagctacttgggaggctgaggcaggagaactgcctgaaccgggagggtggaggttacagtgagccgagatagtgccactgcactccagcctgggcaagagagcaagactccctctcagaaaagaaaaaaaaaaattccttgcacacatcatttgattactgatacttactaagagtaataagaatgcatatataggctgggcgtggtggctcatgcctgtaatcccaggactttgggaagccaaggtgggcggatcacctgaggttaggagttcgacacaagcctgatcgatacagtgaaaccccatctctaccaaaaatacaaaaattagctgggcatggtggtggatgcctataatcccagctacttgggaggctgaggcaggagaattgcttgaacccgggaggtggaggttgcagtgagccaagatcacgccactgcactccagcctgggtggacagagcaagacttcgtctaaaaaaaaaaaaaaaaaaaaaaagaatgcacatatagaggtagtgggcctttgaaaggaggatgggaaaacaaattcacaggaacactgcccatggtatattcagcttccagatacccacaggctctaagagggcctccatctctttacattgtccagggcctaaacaggaagatgggaattgaggtttggggcacttgagccataagagaagacactccctaggctggggtttctagggctggtcaccaagatgcctatcactttcctttcaggggcttcagagaaacaggctcacaccccaaaacagagtcactaagggacctgaataccaggaggagggtctagaaatggaaagaagtggagctcagattgagaaccaactggagaaaggatctctggtcctgaacatcaaaacgtacaacaagggggagagaacaggacaaaatgcatcagtggaaatgagtaaaactgaaggagcaggaggctgctggggaaaagtcaggctgagaagaggccaagaacagaccctggctgggaggacacttccggctcagtcccccaaatcaggatgaggttcagcttgaccacagctgtgctttctatagtctatatgtttctggggtaaggagcaaaagcacaattggggtaaaatttctttttttctttcagtctgaatgcaactagctttggaaagttgagcaatttcaagctccgaggttttgaacagtagaaaggcagggaaaagtgaaagaaggtctcagcctgaccaggtattttgccagcggccattttcaaggcctgcaaactcaacccggctttgttttgctggcctccgaagagagcctctcttaggggctcctctttgcatgcacaccattttgaccctgcttctttggtgaatagagtgtgggcacgattgtggctgcacacgtccttgaagttccagagggcacctcttccttcccatctggccccccacaaactgccaactaaaaacaatccaaaagctctaaacagagctcaaatggaaaaatatatttccttcctcaggaaagactggaattttcttcaaattgagaaaaggcaaagaatggtttataaatgtacagtttctatgttcacaaagatatgatataccccaattatataaaattatagccaagttcatatttgacctaatgcttttgctttccaggtttctttgcattaacacagatttcaaaaacatgaaatatatattaaatgcaaaaaaagttttctctaagagaactgctacacaagcaccatgaggccaagttataggtttggtggcattaacatagatatttgcatatattcccttcctaatctgctttcttgcagatctaagcgaaatctgattgttttctcaggcaaaaacccagccctaagagcagctcataaacctcaccacagacacagtactcatggcaacaggaactatttcctttggcttatgagctctggtaactgtcaagggggtggggggcgccgatcagagaaatctggaaagacatgagtctgtcagaacacgtgaaaggacttgacatggaggccacatttgtgttgcacaatttgcatgagcacttctggacaaattctattttcacatgcaattcacagacccgcggtggcagtgctaattggtgaggttgccactcaagtgtggtaccaaacaggagctctcactacatagatgaataatacagagttttgagcaatgcagtaattattttacagttattctacatcaccatcattccattatctctttgtccccctttcaactctcatagtggagatgaataagaacccccccccaccctattctgccaaaagtggaattcatgttatttgaaatcaacttaagaataagaaaagagatggcaaggaacagctatcatttcattaatatggatggattattcatgtcactagagtgacagtgaatttgattgtaccctgaagtgccaataggatgccaaacacagccgtgaaacacacaagaaactctgaatggcagagtgctttggaattcatctgcaagaattccaaacccccaagataaggtagctcattgcccacatgatatttcaatgctaagtgaagagaaagggagggttcagatcccctgggtgcctcccatagctccaagtgacagggaagaaggggtgacaattccccagtccttcctaggtggcattagaaactttagaagcaacacagcatcccctgtgggtcactctctagcttcaataaaatcaaccgatcagagggaaagagaggcctcctaggcggtgggtcgtgagtcctccttctgaggatggttcagcatttgctgcctctgcactaaatgcaaaccaggtggactctagaaatggcctttggtgcagttttgggctttcttctctttgttccttggagatattaagccttaaatcctctttgaatttgagagttactgattgagctgtatctgaaccatattacgccacatgatgaaactcgacacactggaattcactcctccattgttcactctgtctgaccccagtgaagaagtctaccctcctgcagctgataaaaatataaatttaaagaggtagttaggtcctctttaggctcaattactttctttgtatattctacctaaaaatggccttcctaaggcactctattttgaatttcaaaagttagcgatagattttcatcctagcatttctcatcttcaggtctcatcactacctcccactccctacccccttttaaaaactgaagtgggaggaagtttcagaagaagggtttttgttttgcttttacatttctgacttaggcctcagttgaaaataagcaatcttttatgggtagtgggagtggagatgtctactcctatttggaacacctggcaagctgcctcctgtgattcaatcactcttttcctgaagttagagactgttagacctgaaggtcagtcgtccgtcttcagggtctaactctggatctggcctgcagagtaggcaaagaaagatggggtgagtagtcacccataggtattttccaaataacaaaatgcctctgaaaaatatctctcccatgtccctgtctaaatataacattttcccatttgggtttagattttctaggagactactatgatacttaaaatattacttggagtagtctaacatattcaggttgagtatcccttatccaaaatatttgggatcagaagtattacgaatttcttgggattttggaatatttgcatatatataatgaggtatcttgggaatgggacccaagtctaaacacaaaattcatgtatgtttcataatacacgttatacacatagtgtgaaggtaattacatacaatattttaaataacttgtgcatgaaacaaagttttgactgcattttgactgtgacccatcacatgaggtcaggtgtgaaattttccacatgtggtatcatgtcagcgctcaaaaaattttggattttggaggattttggatttcagcttttccgattagggatgctcaacctgtatatataacccacaatagcccctaaccctaaatagtgcttaggttctaaggggtggtacacagatgggtgggtttgatggaccccagggagccagtgggtagaccttgtgcctggagggaggaggaaagaggacactggaatacactcagcccaggtcacaattttgcccacagcaagccatggagttacaatgacatctttgacctctaatccgcaaagtatccattcttatctcttatagtgtctgcatgtaaggttacagtatagctccttttgataaagaaaggtacacattcaaagcagagacctccaaggagcctccatataaaaggaagcctgtattgcatttattactactatggtctgagcccagcagcagaaatctgaagcttatcattactgcctaactctggaatagccttatcttttctctagactgtgactttgggattcgaattctaactttccttgcaggtagatacttcagcaatttctacaaaatgttacagatggctatctgtaggttctccctaataattcctatttcattagctctaagactcataaattttaaggctcacgttacgtactactagaaagaaagaaaaaagcaccttgcagaactatggtgtgccatcagttgtaagatgtatcctgatttcacagatgtaaaaatgtgcatcttaggatcaatgagatatggtatttaggcctgtggttgcatgggcgcaggcctgggactaggctcctatacaaccaccaggtctagcatggcggacccaactcctcttccagtgtgtggcacccaccctggacctagcctggctctctctgtgctcacaaccccacctatgaaaagggggtgagtgataaccactccccaccgtcttctttggggtcaaaaagaggatggctgggaaagtggctggcaggtcatgggaagctttggaagccaggacttctcatgtcttcattcagagaaggcttggcacaaatacattctgtatttttctaaatgataataataaaaaacctttaccacatagcatttatacatatttctcccgagagagcatgtgtacagataagaagaaacatggccaatcgaagatcgcagcactaacacctaaatgattttagctggattatagaagaaaaaaaagctagaggcaggcaataattttaagggaaaaaaatgtccctctacattgataaccatagttcttcaggctgttaatgcgatgtcattagctacttccttgtggtgacactgggaagagctaacagggggaaagaaaataggatggcgaggtctttgcaggctggggtgatttttttgaacctatctgctaggtcaagataataggaggatacaatacagacctgaagaatttattcttcctgtcttcaaaaagacttatgaccgtcttgaatcctgtttcaggagagggctcagccagtgaaaaacagatttgtagaaagagagggttacacaccactcaattcctattttccttctttcccttttcattggggtaaaatatacataacataaaatttatcattttaactccttttaagtgtacaattcagtggcattaagtacttcacaatgttgtgtgatcgataccatgatctatttccagaactttttcatcttaaacagaaactctgtacccattaagcagcctgcctttctttgcttttttcttttctttttaatctatctatctatctatctatctatctatctatctatctatctattttttgttaggagcattttaactgctgttatgggtattgatacaaatttggaaaggaatgtgattaatatgcatgatggagaaaatcctgacagaaaaaaattaaagatgagtttcagaggctggtaggagaactattataagcaggcctttataaccttgagtctaaaactaccatgaaaataaaatataattttacaaaataagtgaagggaaaaatatctgtattagggcaactgcagatcttttatgctccttccctacatacatccctgaggctgaggtgagaattaataagtttacaaggctactcaagtcaaatagatgttaaactatcaaagcttagccccactcatttcttctgtttgtccatctgtggatccatctctcctttctctcatgcatatgccagacacagcgctggacaccatggctaccaagacgcacgggtatggctggccctcaaggaactcctacatcagaagggagacaaatggaaatgaagaattgtgtaatgagcaaaagacagataagggaatgattaactctgtctggagactggggtggagggaggggtaagagttaatgaaaaacctctttgcccaaggcagaattaagaattaatactacctactatgcacatgtacattaatatgttgtaatgttataaagttatgaatgtgataattatagactaaaatattagttgaatagtaacatataaactggcatatgccctatgactgaaactgcaaaacttgaacaagtgcataatgcaaacaatattactatgcaaaacaaaggtgtattagggaggtcaattatgggtgagtttttaaatgtaaaaaatcactaattttaatcacatgtttatgttcttatagttctttaaacattattttcttcttgattataaatttatccactatggaaaatgtggacaacacagaaaaatataaaatgggaaagcaaaatcactgctgattattaccacaaaatgatagtcactcaatgtatttccaaccaaaacattcattcaaacaagacaaggatcatagctgcatgttactccattgtataaagctgttatcatttatttaaccaattgcctattgttggacatttaaataattttcaattttcactactttatgctgaaatgaacattcttgtacataaacttttatgtatatctctgattatttccttcaaataaattcctaaaagtagaagttttgtgtcaaagagcatgaatgtgtttaaggctcctgttttggtacatattatcaaataccctctggaaagatatgacctatttacacttccatcaggaatatacaagggtgtctggattatactttaggttcaatttttaaaaaatgaccagcccagtgcaattgtgattcttcatgattctttcctaataaagaagacactgtaaataaaactaatttttaaaattatttaaagtttatttataacatgtagtcatctaagctttcccctcagtttctcttcctctgcccaaagtcccaggagcaggcatggtcggcctctgttctccttaatcagcacgctgacatcctatgtctgttgctttgcctcttcggcgtggcgaatgcctgagtgccacaaacaccatttccctggggttgtcacctgagattcttcagctgtctgctcagagcaaggccccgtgtatcagagtgaaaaggcacgtctttattcctgtagttggcttggccagctggccggcaccaattcttatgaatgacagccggtttgctgttccatatttcaacagccataagccggaatagcacctgtagactctgggagtgaaacgcactgggaatgacattagagaaagcctgctccttatttggcttggacctcccactgcctcggcaatgtggatttaagaaaactgtgccagcgcagcatggtggctcacgcctgtaatcccagcacaggcgtgctgggaggctgaggcgggtggatcacgaggtcaggagttcgagaccatcctggctaatacggtgaaaccccgtctctactaaatgtacaaaaaattagccgggtgtggtggtgggcgcctgtagtcccagttacatgggaggctgaggcaggagaatggcgtgaacccgggaggcggagcttgcagtgagaggagatcgcaccactacaccccagcctgggcgacagagcaagattcaggatttccaattaatttttggtccctatatatggtttactacaacagcagaaaaagaaagagaaagagtgagcttttgcatgtcagtattaagtaaacattgacacatttaacacagggccctgcgcagtctgttgaagaaactacaacaggccaggaagtgcctgaagagtgtaggaagttctaccaaaatttctggttgtatgaattttaggcaatggatcaagatatggcaacagttaaaataaaataaaaaaaccccctaactctgtaatttctaattcatttaatgaacactgtggggtccaaagttggttgaaaatagtttttgcaaatttgaagttaaatttctagctctgcaggacttacgtcaaaacacccgctatggtctgggaaagaataaatctaagtgtgaaagttaactcaaaagttatctgttcatctacataattcattaggaaagcggcacatagtagaagaaaaaaaagcaactttctgcagagtattcatgaacatactgcaggagtataagaacagcaaagcatgtaggttgtccggggaagaatgctactttgaaccttctaatcccaatgtattggttgtttagtatgctttgaagggaacactccctccacccaatgaaaatgttgatgattttgaaaaatatgatgtgcactgataaaacattattcacttttaaagtccatggtattgaataaaatggatctttaattttgagatttttattatgctccatcaagacacaggaactaaaaccagtagtatactggtctatgtaacagaatcacacatggctgaagacagaaagttggccttaaaaagttgtctgtcagcattctcatagaatatcccaagaattatacctgagagtcaaggactccaagccttaaaccttaaagggaccccgaggcactagctaacttctccctcacagggaagctgccttggagaagttggtgtgcaaattcaagctcgtaataaaacacttctggaaatgacttggttgtggctgtgctttaggctcctaccagcatggacagctctttgctcactgcaccttccccctacattctctgcaactttttgctctgaattgagttaatgtctgacagtttggcacccgtgaaaaggttgctacttttgaatggcagcacacaatattttcgagaactaaagtaagaataattatctggggaaacacccaggttttgcaaagccaaaacccctgcccttctccctaacatttttatggaggttctcttaacattgcaggacctcatatgaatgcatgactaagtctcccgccagtacagcagcttggaagcgcattatcacagccaacagataattcaccgtagaaccagaaggaaatcagtgaccttgcccactgcgctctggtctcagactcatgcctctgtgttcctggcctctgaatatgctgttgccatcttgctagcctgatgtctgagccagggggatcatcctagactcttcatcttctgcccgcctctcttcatatccaagctatgagagaatcagggcgttttacctcctccacagcaccctacttggcatttcattggtccaggctgtcaactttcccttggagctctctgctactctcctggctggttgtccatttttcactctggtttctctccaatacaccctctagccaccaggtcctgagcctgccagtactccccctcacactcacactccagcagggtaagaatcctattcctggccaggtgtggtggctcacccctgtaatcccagcactttgggatgctgaggcacgtggatcacctgaggtcaggagttcgagaccagcctgaccaatgtggtgaaaccccatctctactaaaaatacaaaaattagctgggcgaggtggcgtgagcctgtagtcccagctactggggaagctgagacaggagaactgcttgaacctgggagatgcagtgagtcaagattgcaccactgcactccagcctggatgacagagtgaggctccatttcaaaaaaaaaaaaaaaaaaaaagaatcctattccttatcagggcacacttcatgacccacctctccagcctcatctgttgagggccaccatgccagcccccatgctacctctgatcctaccagactatttgtatttggctgaatgtgtcttgctcttccctgtctgttttctctgcctccagtccccctaccttctttacctggctaactccttctactcatccttgaactctgagctctagtatcacacccaggaagccctccctgccatcaccgtggctggtcacttcctctctgaatatccaaagcaccttctgcctttcctccactagccttctcattgcatgtgtcacaaccgcatgcccatcagtttctctccccctggctgagggtcccttgccagcctttgtctttgtattcactcgcctcttgcagtgcctatcatacagttaggacctaatgacttagtgatagacaaatgatggaaaataggtctgtgattagctgcttcctgcaaccttgttatattcctacctgaccctccacaggtcaactcaggacaacttttaaaatttgatttgggagagaggcgtctgcatttcctgaggctcctgtctaaatcacagttctggccatccagggaaggaaggtatgccttcctactcagcagatgtggcctgagtatacgttgctgtgtaaaggaagaaaaccaaggagtcacggtagaatctgaatatatcttttaacttttttttgttaatattttaagatatggctactacagctgattgttatcgatctgtgtgtgcagaggtggccagaaagactgatgtatgcccagctgttcatttgataccagacacacactttaatctgggtctgaaacctcgatttgtatgacccattgtggccttttagggccaagctcttgacatgagagttacagcaggtttcctgcctcccctccagccatgttcggctgcaggagtatgctcggtacgttatcaaacatttctggtcctctcctgatgtccccgtttattttccagcaacaactgtctcagaattggcttttccaccttatccatgtcatctgatgactagcttgtctcttctccaaattcccccatactagtcacatcttcctcaaggcttttcctggaccaaactaaagtttcctgaagatcaccagccactgacaaatacaccaagtgatatccctgtttccaaaatatcaatcacacactcagagaaccactgagctggaagggacctctgggcatcgtggcacctgaacctctcttgatgagaatctacaagacattttgttagatgtttgtccatccatccatctgtgaaaaatcacagtgattggttgagagactggttctaaaatgaacatcatgtacttgggagacagatgtccaacaaatcacagtcacccagaaagaaccttctcgcccatgtgatttctcctctgatccctgatgttcaaactgacatttgaggggaagacagaaatgtgtccagataaaactctccagctggatggtacagggcacagcagttatgacagaaagagaagagccgcagcagaagagcagtctggttactcccccagggaaataacatccagagggatgggggactccaatatactgccttgaatatcaacacactgaagtatgcagcagaaacagaatgaacctgctggaacaggctggtgtctgtggggctcacgtggcagggaactcctgcttcctacccctccacatccaccctgcccttgccccaggtcccggcctgactcctcaccttgaaccagcatctctcccttacaatttttctagctgctattaggctgtagtcctgctctaggtgtggaagaccaactctaggttctggccataaattgttttagcacctaggcaaattgctttctaggttattaaaagaactgcagatgttagaggctgtctctaggattgttagacagccttgttttgtgctttctttacctattttgatttttctataagaagtatgcattattttaatatttttgggaaaagaaaaatgatttaagataaaaatatttttttgcatctgtggttatggaaacactgttaatatcgagaatgaataaataatggaatactggaatgaaccatgaagagaagcaaggcaatagcccactttcacacagggggtaaaggcgaacatgatattgatttcttgcaaagttttaggacaaaagattaaacaggatttctgaaaatatgtaaaacaaagaggccacctttcccattattctgtactgctgttaactgattatagtaggggaatgccacatatgtgatacttctcaacaacacggtatttggcaaactctctcatgacaacttttggacaaaatggaaaacagtgcatagaagtcaagagtaggttccttggaagctggctgaaagtctggtcctactggtacccagattggtgtcaatctagaaagagttctctaacggggagtgataaggcactgtcactgatgtagatgaaggcagcagatacaatgatacaaacctgaaaagatgagctaaattctccctgtggagtttccaagatgctgaaagttgagcagaaactcaggtcaaacttaacagaggtaaatctagaattcaggtgaacaagaaaccagctacacaagttcaggatgggaggcagggaagtgggatagatagaatgtgggctttggaatcagtctgctgggctgtaatcccagcacttcgggaaaattacttaacctcactcagcctcagtgtaggtgggagaattaaaagggactgatggcaccatgtttagcacagcgcctggctcatgggcacaggacacgctcaataactttataattattaaatgtggccagacaagagttcattgtatacagaacaccaaggcgcttcattgcccaaaggaacagtaagaactgacaaagtgatgaggctgtaaaacacgtgaatttgaacttaagctgcagattcaggaaagaaactgtactactatattctatacccatcagaagccatctggaatattgttcagctcaggacaccacgttctgaaagagataccaagaggctggagtgtatccagaatggtgtgacatgagagtgagaaacagctggacaactagaatcatttaagaaagaaaaatgagtacaggatggtcgtgacaactctcttgaaatacttgaggaattgttatatagaaaagagagtcaaattgctctgttgttctagaggacagctttcttttcttttctttttctttttttttgagatggagtttcactcatgttgcccaggctggagtacaatggcgcaatctcggctcactgcaacctccacctcccgggttcaagtgattctcctgcttcagcctcctgagtagctgagattacaggcacgcatcaccacacctggcaaatttttgtattttttagtagagatggggtttcaccatgttggccaggatggtcttgaactcctgacctcaggtgatctgcctgcctcagcctcccaaagttctgggattacaggcatgagccgctacacccggccctagaggacagctttctaaaagtcttcagccaagtttgtttaacaaaagggaaaacttttcgacagaatggaccatggaacaggttgcttcatttcccaccactgcaagtgatcaaagagagtctggagggggcgttaggggaattggagaggttttcacagttgttccccttcttcctcctccctgctccaacagctacagcctctactgctggaccttactaggcttcctttcatcccattaatgatgattagataggacacagagtcccccagttcctaaccttctccactagagcacagaaggcacattctcatgcacagatgcatattcatccagcaagtattcgctgatggccctctacaggtcaggaagtgtgctacttgacaggggctaaaaagatgaacaaagtatatccccagggagcacctaggctagtgagaaacaggcccctcaacagatgcctgtgaaacggtgaggcaagtgcagtgatagagattagcacgggggactctggaatcacaaaagaagctcaactaacccagcctggctgggtcaaggggagtcagggagagttttctccgggagtagatcctggaagctgtgtgggaattggttaatgtgttagaggaagagggacaacatgagcaaagtaatgaaggtaaagaacagccctgtggacaagcagttctatattgctggattgtgaagcatagggcatgagacaggaagaagtcaggctagagaggttggatggaccgagagcccagggagcccagtgtgggtttctaggagcttctatgccacatgcagaaacttgcatggatgaaggactcttgttcgagctgcagaatcctaactagtccctggcctctagaaaatatttgtgcaattgtatgtttcattaccatgcatgtcctctgttccatgagtgcagggccttgtccatctaattcatcactatatcccccgtgtctagcccagcgcctgggacacaataggtgactaaaaaggaagaatgggaacagaaaggatgcagcttcacagggtttttgtgaggcttcctaaggtgctatatgtagcatgcttagagcacttggccctagcatgcatgaataagggacagtgattgtgattatcattcatttgcatttctttttctcctgtcttgttgatttttcaagcccactgcttatagtacctttgcttttgtggctggccctgattaatacattttgatgagtaatagtgtttgccaaatgataacggtccccaaagaggcccccaacctacagagagttacagaaatattcagcatcataaaccaaaaaaggatattcaaaggacagaatcgaggaactgatttcctcaatgggaatacaaaacttatgtttgcaggcaggcctcctcgagaaagtatgcaagtgtcacatgaggctccatcgctacactcatggccaaaactttaacccccgtgaaccctggataaaaggcaggtagaaatggttgagaataaactgttctctgtagacctcgttgaccctaacaaccatctgacggggctttaatctggtggggtgtggccaggcacagcccatggaggaaagaaagcccccctttctttcctgaggagggctggagagggggtgcgtgtgcatatttcgtgtctatgtgccaaagttaggcttcctgacattgtttcctctggcttctcttggcacagtgtcttcctggtctatgaaggcctgcaactggctgatcttggttaaagggaaactgaccagtggtatttggtggatactgcttgtcctaaagattcaggaggaatagaactttctccaggaacccagggacttatccagggatgacaatctaactttttagggtctgattgaaagatctgcatccttgtggacaagaacttaactctacagaggagattcctcctgccacaggattacacctggaaagattttaacattcttttcctttgtcaagtccccaaaggatacattcctgatagggaatcctagagtttattctcccttgaatgactaaggccctaggcaaagctgaagaggagtctggattctgtgagaatgaacaaggcagctgctcggagtcggctgctgagggggccatctgtttaagcaacgagaagtacggagctaaagaggcacacggtattcaaacatgtgagttccctgcaccagggcttctggtcagttcttcaatcaggagagaaaatgatgcttaggtgttaaaggttcagggggagccgaaatgacttcaattgccaaaataaacagaattgcttaattaatctaactaaaaaatcctgttcagcattggattaaaaaaatcatgttgatgctgcccctgtttatttggctgaatcctggactgagagggtatatttagcctcagtgtgcttgcaggattgcatcttgcagctcaacaggaaatatctggagtcacagctaaagatatctctgcatgttcagaaatttacgagcagctgtaaaagtggagctatggtgggcagagtgctggaacagtctccctttcaaatgagagaggccgctgaattaaacacttgaatataccaagttcatggcaggcagagggcacctgacatgctaaaaatagccaaagtggaagtgcttctgttgctaaaataatactgaactggtatgctccttttctcaacccacaagaaatgggtgaaggggtagagggtaggctctgagattccaaaaagtgtgtcagaagctatgccaagtgaaagtcatttcctcattttgccacttttcaaaaataaatagctttcttaagctgagcaaactgaagtagcagtaatcaatatattattttttaataacacgagacagaaatggtagcagcaaaaagacactgcatacctggatctgtagtcctgctgacaagcaatcctgctgacgagcaaaccttttccatcatgggcaagactcatttatttttaaacatccttttgctagactcccttatcagcaactccacgccctgctcaccaatgcccggctggaaaggtccctacttactcctgtgcacatgcctggcaaggctgcttgctaaacagcatggacaaggggacgtctgtgcccctgcatgttgccgggcagaggaggctacgaccttttcccgaatggccattaggtccaagagccactgaactttcattctgtgaccgaggacattgtctcatctttccaagtctcacttgcccttttgcctgatgtggggctaatagagattaccctggtggcctcctgaagttgctgtgcagatctagtgagctaatgcatgcgagagcactttgtgactcccaaaagcctgaaacctgatggaggatgtggttgctgttgttattgggcattctactggaaacgcggggaaagaacagcaacatctcccggtgataagggagtgctgtgcacagacattgagtgtgttctcttttgtgggatggtgccatcttccacaggtacaagcactgtccacatcccactgagagcagcaggggccacaggaagtccgcttgctttcaatgagcttggcatggctcactgccggcatcgcggccacactcctgcttcagtgactgcacctactctgggcagctcccaatgcagggctgggcctgggttcacggggaagcaggggctgagacagaggtgagcccagcctcagtgtgaatggttatgaagttatcaccagtgcctaccctgggaccagtcccccaggctggtcagtactcctagctgggaggagagagatgcctaccttatcttaggcagccccactaacagctgccgtttgggctgccactgactgaagggattattatttattttctttggttctcatctccttctcatctgccttacatgttatatctggtaaaaaatgataagttcaccatgatggtcactgtggggcacatggacaaaaatatgtatgcacattgtctaaaactggaagggaatattaaaaatgaaattacttgctgttttaggatggtagaattaagaatgctttccttgcttctttttttgcactgtctaatgttgttaagtaatctttaaaataatttaaaaaaggaactgcaattagggttttaacattttgtaaaatgacattggttaccctgattttggctttactgggcctgaaagtgcaaagttaaagaaatatcacataggctaaaggattccaatgtaataatcatattttcagcctctgaagtattttaagggtggccttcttcatttcaaggtttttttggagaatgtagtaaatggcaaaggacatgcaatgtttaaaagttggaaatcaaatcatagcttttttatttggaaaatgcttagaagtctacaatcttttccaccaatgaagaatgaagtattggccaggtgtggtggctcatgccggtaatctcagcacttcgggaggctgaggcaggaggatcgctccaggagttcgagaccatcctgggcaacatagcaagattttgtctgcactaaaaataaaaaaaataaataagccaagtgtggtggtgcgtgcctgtagtcccaggtactaggtggctgaagtgggaggattgcttgagcccaggagatcatggcttcagtgagctatgatcataccactgcattccagcctgggcaatacagtgagaccctctctcaaaataaataaataaataaataaaaagaatgaagtgtctatcgagcacctatgtgctgaacattgggcaaggtgttgtgtatttcttcttagttcccccttttccctgtttctcctcccacaaagtgagtctcactggttgtttcgtaaggcactactcagttaactcccttcatggtctttctttttggggggtgggggtgggggatggagtctcactctgtcacccaggctggagtgcagtggcatgatctcggcttactgcagcctccgcctcctgggttcaagcgattctcctgcctcagcctcctgagcagctgggattacaggcgcccaccaccatgcccagctaattttcatatttttagtagagacggggtttcaccatgttggccaggctggtctcaaactacagacctcaggtgatccacccaccttggcctcccaaagtgctgggattacagacgtgagccaccgtgcccagtcacgagtgatttttttaaagctctagatgccaaggtagtgtcaatgaggggaactgccaacaatttctggttccttcaataaacaaccagaaaccatgacagaatagggcttggcacctatggtaaccggccacacccagctgctttctctggagtacagcaatagaatggacaacggctcagatcttctccttcttctcccgacaactccaagtccgccatttccttctaccatgatttagaaattatcccctctatttgataaagaggtaaattaagtcaagggaaggtaaaggttctggcatctgggcactcggcacatgaagagcaaaactgagaaaagaccaaggtttgccactgcgccatctccctgcagaccagctctgcaggcacggccatgggggccagtgaatgtcatgagacgttaagtgcgaggctgagctagttgccctctgtattttggtacccacacatgaaaaactgggggtaacagtatgtgttccttcccacctcacaaaaataccttatctacacataacaagtatacacgtgactattattgtccactttattattatgtcaatgtgattactctgtaacccaacttatattcctttgcctcccaaggaaacagacaaaataaaacatgagcaccacaacaactttccagcgggtacaggtaattaattctaaccaaaaaagtccacattgggtcaggcctaccactcagctattcagcttggcacggaatctcttttggtggcaccaagggacatgctgacggatgtgttcgttaggaaagcacagttgtctatgttgatgtcaacctcaaattgtgagggccacataccaaaccactgagtttttgctaacatctcgtcacagatctatcatccatgaaattggtttaagctgtcttaaaagctatttatagttctggtcttaccacatcttacattaatgaaattccttacgcttatgaaaccagccatgtaaatgagtgatgcttccttttttcttcttcttgaatttgcctctttcaaactccataatggtccttccgactttgtcttactataccaggatttggtgaacatgtgtgtgatatattacattaatcacatacctggtgattttggagtcccattatagctcctttcagtctttatgtattcagacagaagaatccaaacttttaaatttattctcacatagtatttcttaaatgaaaggttattaactttggtctgaggaccccaagttagccatagattagcatgaaagtgcatgcaaaactgtgtgtgtgcacacatgcatttctctggagtaaagggttagagagaatctcaaaggagtctatgactccaaaaaggttaagaaccaccacctttgaccacttggttcctccttgaaccttttttagttctggttagttatttcttgagatgtgatggccagaatggcatattatattctagatgaggttatgtcaaaattctgaacaagtttattttattttctttgtaatttttcaccagatgatgtctcctattttggtggaatatctttgttggccactcatatgtcttcttttgaaatgtgcctgttcatgtcctttgcccactttttaatgagttttgtcttgatgatttaagttccttatagattttggatattagtcctttcatggatgcataagtttgtaaatattttcttccattcagtaggttgtctctttactctgttgatagttgtgtgtgtgtgtgtgtgtgtgtgtgtgtgtgtgtgtgtgtgtgttgctgttctttaattaggtcctaattgataatttttgtttttgttgcacttgcttttaaggacttagaactttctcaaatatatttttgatagtcttatgccacaagtttaagttatttgcttaaatatcaggttcttgtaaaaaataacatctgataagtatcttgattctcagaaacaagttgctttataattcccaagtcttagtatttactattgctcagattaatttggccatattacagtatgggctcaagcataaagatgtattatattttggcttacagttgtaaatacctccttatgaatcaatagcaatgtaacaccagatgtttaaactgttctactaatgttcaggaaataaagcaaaaccaatgtggattcctgctgctactcttagtactacgctgatgttgagaaggtagccttggtgggccagggcagagaccagtcctgctgcagcaccccatggtgctggctgatgtatggggtctgggtagacagaaatcaaggcctgaaagctatcgtggctctcttggaccaacaggaatgctgggcattcactcttcaacatcctgcttcccctcaggttaattatatattttccccccttttctttcaggtgataacataggatgtgactgtttaaattcacctggcttcggtcaacattgacagaaggtgtacatgactctacgggaatggggaaatggcagcaccaggggctgactgagccccagtcctgactgtgactgctttggtaacaacaaggtgtttaggaagaacagtcccagtccttttccaaaggtcgcctcctggtgtttactaaaggaactctgagtctcagcagaagcagaagtcctaccattagcttgcagaacccttcaggatgggaaagaagacttgggcttcagtgactcagcctggagctgggaacaggcaggcagggatacagagtgggtgttcttctcctacaggaggagagatgcatccctcatgcccagagaggctctggggtccccgaatccagaggtagtagaagaagagtcaaaacacactctcctgagaacacatctcaggtgcatggaacacaagacacgctgctttgattagggtgctctcttgtccattttgttctataatccacaagagaagaccatctgcacagcagtgacatgctctagttgaccatgatgagcctttcctagggaaactattttgagtggtatatcttacaggagactgcaaggctcaatagtacagtcaccaggaaaatctacatgtaaatatgacacttatgaaccggcaataaaatatggtgagtctaaagaccttccatgtcaaagttctttttcttttttttttttgacggagtttcactttagttgcccaggctggagtgcagtggtgtgatcttggctcaccacaacctccgcctcttgggttcaagccattctcctgcctcagccttctgagtagctgcaattacaggcatgtgccaccacatctggctaattttgtgtttttagtaaagatggggtttctccatgttggtcaggctggtcttgaactcctgacctcaggtgatccacccgccttggcctcccaaagggcttggattacaggcgtgagccatcgcgcccagcctcttttttttttttttttttttaaagacacagtctccctctgttgcccagtccggagtgcagtggcacaatcaaggttcactgcagcctcaaactcctgggttcaggcgatcctcctacttcagcctcctgagtagctgggaccacaggtgtatactaccatgtctcagctagttttttattttttaattttatttttgtagagacagggcctcactatgttgcccaggttggtctcaatcttctgggctccagcgatcctcccgccttggcctcccaaagtacgggcattacaggcatgagccactgtgcccagccaaggctccttgtctgtgaggaggattcagagacatcttagaaattttcattacctttgcctatgaattaagtatatagtatcggcaaaaaatatttggacacttctggcttaaatggatggaagctttaagagttcaaccgttgttcccatggacagggcaaaggtaggggaaggaaaacggaagtctctactttagttcttcacttatactttttcttttaaaaagactattctgtttgtgtccctggcaacaagctcctcccaggatcctaagggagttggtggatagggaggaggagattggtggtggctgagctgaagcaggacagaataggatactgatgtcagagggcgaggcaggcgctcagttggaaagttgctctttgttcctaaaaataaaagtctgaccctgcttttttgggatcttccctggaatgaagccagccaactgctgatctctttttagaattagctcagtagccctcagcccaaaggtgaactccaaagaccctccagatattctggcccccaataaaatgttacacagtaaagtaaatgacatcagagaaagtttctcttgaaaggataggatggcctgtatatttgtaaagcaaaatgtatccagcagaaaggatgagtggataggactagggagaggagggggatattgaagacagagaataccaggttgggaacgctgcccagaggttgtgaaaggattaacaactggatgtggctgtgtgctttagaaaattctctaggaggaccaagtgtggcaaggaacctcaaagaccctccatgaaggatccacaccacaccctccttctggagagctctctacagtactcggaatcttacgttttatccattcatgaagtctttacccaaagttacagctacagtttataaaatggcagtgatgtattacgctgcacatcaaacgagaagcccttttcctttaaagaggttgtattttggagagggttttgggcagccattgtatagactgtacactgttctgggtccaagaaccaaagccatgtcttagaactttcctaagactgagcctcatgttatgggctgatcatcctgtatatctaaggaccctttttgcagtgtcattcctaactattccagtgaccagccaccttaaatgactcaatgcataaataaaacatcaggtagtgaagaagttctttccttccctggaagcgggataagattctgtggccatgcacacaaaagctcctatacttttctctcattagcaaatgctgggaagaaattcattcaaacttcaatcattattttttatgtaagtatctgggactacaggatgtaaaataaagggcagagttcactagtttatacactgctcctctagagtttagctggcggaaataattttctggttgagaaaacggaagattgtaaaagatttctcaggaaacccttagcgtatttaactgcaaattccccagcctaggacagagtttcttaattaggtaatccagagggaccacctgtaccagaatcagctacaggtgctttgaagatgtagctttcgggggcccatcccagatttggatctctgggatggggcccgagtatcttcaattggaacaagctcaccaggtgatacactgaagtttgggaatcattgctatgtcttgaaagaaacatcccacaccaggtcacctctacttaaagtaaaaaaaaaaaaaagtccgggcgcggtggctcacgcctgtaatcccagcactttgggaggccgaggtgggcggatcacgaggtcagcagatccagaccatcctggctaacacggtgaaacccccgtctctactaaaaatacaaaaaattagctgggcgcggtggcaggtgcctgtagttccagctactggggaagctgaggcaggagaatggcgtgaacccgggaggcgcagtttgcagtgagccgagatcgcgccactgcactccagcctgggtgacagagcgagactccgttctcaaaaaaaaaaaaaaaaaaaaaaaaaaaggtaaaaggacctacacttcttcaggtgtagctcttgctttcctagttcacagatatttttaaagttgtctttttgtttgttagtttttttgagacagaattttgctcttgttgcttaggctggagtgcagtggcgcgatctcggctcactgcaacctccgcctcctgggttcaagtaattctcctgcctcagcctcccaagtagctgggattacaggtgcccgccaccacacttggctaatttttcgtattttcagtagagacacagtttccccatgttggccaggctggtctcgaactcctgacctcaggtaatccacctgcctcggcctccccaagtgcagggattacaggtgtgagccactgcgcctggccaaagttatcttaacattattggccctccattaacttgtattatagcaagcatcaagaggatgaacttcccagacgtaaaatgagtcagtcaatgttctgtcactggaggtcttcaagcagaggctggaaagccacttcttaggaataccataggaaagaataaagtattgctcacgcctgtaatcccagcactttgggaggccgaggagggcagatcacgaagtcaggagttcgagaccagcctggccaagatggtgaaaccccatctctacttaaaaaaaaaaaaaagaataaagtatcagtagagggccctaaccctaaaataatgtatcacatttcctctagctctatgatcataggataatattataagaaaatcagctttaatatatcaagtattacattttaaaaagtctaagcatatgcccagatttttttggtagttttaaaaagaagcatgaaagccaatctgtaaaactgaagtccagaagctgaggatagaactatcaacaggcttcaggattcttagccttaattccagctctgaaacgtattggctcaccatacgctcatgaagacaaacagaaaaaaggcagaagagttcatcatcttcacattgccctacccagtcccaagcatcctgttatctaatggcactgtgatgactgctaagccttgtcactcttcggagtggtgttcatcagatcagagacttaaatctctcgcaatgcttcaggttcttcaactgcaaaagggtatcactaaatgcccagggaaatacaattttcaagaggataaatgcttgactgtgctggttattggcacctgttttccatttccctagagtttcctcttcactagtcaaaagtgtgcgtgtccatggatctttgctactacagaaaaataattccaaccctaggtagtgctaaggatggggtagcagtgagcacattaccaaaaggctcagcgtaaatgggtacagaagatgagcctgtgcaaaacaaaataaaaaaggagattctgaagttcctcaatcaattaaactaacaattcagataaacaggagagtgaatctgtggagtctgaattatctggcaacctttccatgtatcatattgacataaagattgccaaaccgcccactcttcaattcatgttgtgtggactgtacttaaacacctcgatggctttggaactcagatttgagacaggcacttgaagaagatgactgagaaatgttcaatttgatgaaaaattgcaaacaaccggaccactgtgaaaccatatgtatgggttgtttctaactgggtgctttacttctgaaacagttttcaagtttgggatctaaagcacatggtcaggagttcaagcaagccatagcaggccatcctttgcagcaggccgtgtgagcttcatctttacaaacaaggacaagagatgtgcctgagccacagaaaagagcagcagagcaccaggacttggctcagctccaagtcagaatgctgagctccagagctgggctttggctgttcctctcactgcaggagcagaaataatggtcaaaatgttcctgaccttgactgtctcatctgaacaaatcctccttgacaactactacacttggtaattgtttatttaactgggcgatactctgttactgtctcctccaagtctgtaagcaacatgagggcagggatgacttatgtctattttgtttactgctttatctgaagtggccagcactgtggctggcacgtagtaggagttcaatccatatctgccaaaaggataaaggaacaaatgaaccaatgaatgaatgaagagataacagactccagaagtaattacagctgaatcctatagcccacttctaagagtagtagcattttaggaagccctagtatttcagcttcagagatggctaagtataattgtgtgaagtctgaaaaggacttaaactctgtcgctccattaatgatcaagacaggaagagtctttaagaagagaaaaaaattgacggaggggaggatggcagaaggaaaatcatgtttaagaactaatagaagatttatgatagtaatttttaaatcttagacgtgaattattctaaaccatgataaaagaatttactacaaatggcagttgcagaatggcttgaactgctatatgatatcttattgaatctccacactgcaaagttggtggaagttaagctgtttgtaacttactttggaggaaagagaaataaatgtgtatgtaaacgctaatcaggccgatgatctctcttttggtgcaatttgatagctacacctgggatggggccaaactctctccggggaaagacttccttttagaacaccagcaatccccagatccataatggtgaattacacgggtctgagaataagaggaaaagtcaccatgactagaatgaaaggataatgcaagggtacttgggcttctcatggctgcatggtatatgattctctgggttttatactgctccttccttagccctcagaactcttaatcctattttcattgccctaggtaaactgggaaatattttctcctccttgactgcagttactcacacaataaacaggtaataaacattttactgccctaagcaacctcctgctaggcaggcagtcagaagagaaaaggctgtgcaaaataaccccctacaggataaactgtggggtacaaaggatgagagtaacccttcaatagagcgcaccctctgtgggttccaggagagtgactgggagctgctgggacacattagctggcccttgcggtctagattcctctctgcttgaggctagtagggaagatttgatttcaccaaaaggtaatttagttgccatttcaaagctctgtctagctaaattaaggatgaggaacgaaactggagtttacaatctcccaggttaaaccatgagctgtgggcccggaaaggaaaatagggggcagtttgcagcagagaggagtggttcggggggcagaatgattccgtttgatttcaggtttgcattttattttccaaggcatccttgtttcattgttgttgtttctatctttccggtatatcacgtcaaactgttgctatcatctgctgacagggtgaaaagcacggtggacatcctttgccatcctatttttctttctgctacactcagggttccctcaaaagccttttaccttcagcttagtttaaagcattttatggttccgactgcttaggaaatatttctaaggtacaacttgcaactgttaggctactctgcaccttcccccaactcagggaaatagggcaaagccaaataataataagataagctctgcttctacggctgccatttaacttatttatgggaaataaaaatcttacataaatatttcccaccaaatagcatgccaaatcagaatgtattaacccaaggcaaatgataaatgcatctgcacagacaatcttccaatgcatgtaggctgaaaaaatgattattttgtaaatcaacagttctttgatgtcaattgctgttaatttatggtattttgctctaattttattttgggatatttatttttgttgtattttgttgcagaggtgttgtgatggtctaggaagagccgtaacatgctgatatgtctaaattagagagaaatttgagatctgattatgtctgaaatggctcctgtcgtgatacagtgccctggaaacctcctacattccctttctgctttctctggaacccttcttgggagggttaaggaagtgactctgcagattaggtgataagtgattagaaagcactccgaagaccacactgatagataagtgaaaaataacaaagctcccggcagctttagggaaaagtgcagagctgcagccactggccattttatcagaggctcttaggtagactgaggctttccctgaacagtgtttggatgatccccacaaaaacaggatggaaacacactcaaagcagatacgcgcaaaatggtgcatttaaaccccaaaacaaaaggcaccaaaactggatggcaaagcctgggcatagacagaagccaggggcagaggtcacagggccaaggatcagccagatatggcttcctgggatggcttagaaaaagagtgacatgtaaaggccaggaagcactctttgttttactggcgtgacactgttatttgacttctgtgtcctactttggctccagcatctacaaaatggcatgtaaaaaacttataggggcacagagggcagcaatagccataattaaagggatggaagaaaggttctccaaagcaagatgaaaggaattgcattgtttatcctggaggaaaaaaggttaaggggtgacagtgactgtattcaaatataggaagggttttggagggacactcatccactcctctgcagggtttgggggaggaagaactgacaaaaagcaacaggtttaaatgaaatgctgatgtggtacagggccctggaaaagctgacggttcttcagacagaaggaagaacttatggaaaggcagggtaacccaaaatataggctgactaacatggatcttagacttaatatgtccaaaatagaatttccggttctttgctccccactcctgaaaacaataccaacatctactgtgttggccaagtaaacatttcaagaaatcattcacatttccttccctcctctacctgctccaaatccagtccttcagcagaccttgccacaagaagatctgaatttgatcagtcttcagtctccactgccacttccccagtccaagccatcatcatcacttgcttggacccagccaggaggaaccttatattctccttcaatccattctccagacacctgctttaaaacatttatatttatttatctgagacatggtttctctctgtcgcccaggctggagtgcagcagcatcatcatggctcacagaagccctgactccctgggttcaagcaatcctcttgcctcagccacccaagtaactgggactccaggcatgcaccatggtgcccagcccgggtgctttttagagcataaatcagacgatgttacttgcctgcttaacactattcaaagacttcccataatgcttaaaactcgcacttttgaccatggtcttccaggctgtgcatcagctggctcctgccctctgctgaacccttatcttacccacccttctctccctgctgctctcttgagccacattgaccttcttgctgttcctgaaaagccagctttgctctctttgtgccagctgctcccttggctggaacactcttgacctagctcttcccttggctggctccttttgtcattctgtctcagctcaagtgtcacctccatgggccttctctggctactagaaagtgcacactctgagagtgagaactttatccaccttgttcatgacggtattctcaagccttggacaggcaactgacacgctggggtgatgcaatgaatattggttgaatgaaaaaataaaatgatgaataaaagaataccgtgataaaagtaggttgttacttgctatcccaagagagctggagatgagaaaaagaaagtgttgtgcatggtttataccaccatggactagatgatattttggacttagagattcacagggctgtgcacttttgaagtgaagtgagggccttgcctcctccattgaggtcccagagaagagtaaaacccagtggggcatcatccttatcagggtcagagaattttaggggagtttctctgagcaagagaaaaagcacagagggctgaccttaagtctcagagggcagccacagtggaaggagaaaaagatggggatttaagatctgctatctcacttgaaaaccattgagttggatcacctgtcaggatgaattgaagttactattttccttcttcttcataaagaatcgttagagactgggtacctcccttactcttcctgagggcgaatctctagcactacctccataacatttataaggcccttgtggttccacgttcccacagaaaatgctatgagctggccaggcacagtggctcatgcctgtaatcccagcattttgggaggccgaggtgggtggatcacgaggtcaagagacggagaccatcctggccaacatggtgaaaccccgtctctactaaaaatacaaaaattagctgggtgtggtggcaggcacctgtagtcccagctacttgggaggctgaggcaggagaatcgcttgaacccaggaggtggaggttgcagtgagccgagatggcgccactgcattccagcctgggtgacagagcgagactccacctcaaaaaaaaaaaaaaaaagaaaaagaaaatgctgtgagctattctaaatctgcctttacacagcctactttgattcagaattggacaaaagagggttggaaggactcttggaatatatgactgcaaggtttctgtaggccgtgcacacatacaatggctgaccattgccccagccagttagccaaggccttttgagcaaggttgatgtaatctattttatttttgccctaatttccctaaagagctgaggaatagtctttgggggggctctataaatgctaatgattgattcacacacctcacagaaggcataactctggtaggtttttagttggctttgctgctcttcagttcaaaatcccaaagtgttatcatcaggtggctggtggagtggaagataatggaaataaatttagaaacttaatttaaaaataatttgtgagccccatcaccccaaaagtcctagtggtcacaattttaattatgtctttcaggtttatagccctgattttttacatttaagattgtttctaaaatgtttgagaatggtcagtaaaaatctcctcacatttagaaatacaagttactatttactgcccatattaaaaagtatttcttagactgcatctgtatcctgggatctgccagcaatacacatgaccataggataggaggacagaccggaacacggactggattctttataaatcaataatcagcggaggggtgaggggctgtcactttggtgatttcattttcagccacagctggccagattgctttttggaaaataaaagtcatggcaaattgagcttgacaataaccaggcttgactatggaggccctttctccaccctgcaatcagaatgagtggaggaggggaggccgacagggaaagatgtttccccgaatctgtcacagatcagtcttcgttatgttgtagggcgcaagccatatgctgctactgtaagtgctgttctctgtcagcttgcagactctgctctgttccctcgcccctaggccagcagatgcgctgccattcctgacttccagttccttatgaagaccatgtaacctagagccatgctgtccgaggcggtacccactatttacatttaaatttaataaaattaaaaattcatttctgcaggcgtgtcagccacttttcaagtgttcatagccacacttggctagtggctactatattgggctgtgcaggtacagaacatctctcccattccagaaagttccattggacggctctgacccagaaaactcaattggtgccaggaggcccttccttctttgttcacagattctgaggtctttacctttgcggtaaagaagagaattgggtgtactgaatttgagaattctctgggtgccatgcatctacctagaaagcagacaccacaaatactgtcactcaggacacagttcaaacaacctcaagccaaggagagactcttaaccaacctcaaatgtgcatgtgcttattctgccaaactccagaagacaggtggaatgctttaccttgtattttcccccttttcattgtttctcctgagtaatccttgaaaaaactgctttttattgtctacatgtggctgtgcatgggtcgcccatttctttctttcttttcttttttttttttttttttggagacagagtctcgctcttgctctgtcacccaggctagagtgcagtggcaccatctcggctcactgcaacctctgcctcctgggttcaagtgattatcatgtctcagcctcctgagcagctgggattacaagtgcgcgccaccatagccagctaattttgtatttttagcagagacgggttttacaatgttggccaggctggtctcaaactcctggcctcacgtgatctgctcgccttggctgcccaaagtgctgggattacaggtgtgagccactgcacctgacaagtgttgcatagttctgacggcaaagaattacacaggctctgataattcccctttgctcataggaaaccatcaaaatcatcattttatctttgttagaatgctcagcactcacatccctatgcccaactactataactggtttcactagctccttacccaaaatgcattactctctggatgttgcttgaattgtgtattataaattcttaaatttttaatttatttaccaccgtcaaaggtgttgtacatcatcactgaaaaatagagttgcagaggaaaacccagaaacactctacaacatgaagcaatataacccacccacgttttcctatttggatcataatttatgctgcacaattcagttgcctcacttttggggcctgaacaatgaaagggaaagccttttatatctacaaatagatataaagccagagagttctatagtttaaaaggtcgaggtatgctgtttaaatttggcaaacttcatgatatttaaaagtttggtaaatctcaaaatcccagttctattactagattgttgtggtaggagctctcttctaatgatcgcagagcattttcatatatatatatatatatatatagtctgtacagcacacccattacggctattttctctactagcttcatttgttctcctgcattaggcaggattaactattaatattgttctaatttcacaggtgggcaaagaggggagaatgtggtaaaacactcgggcttcacacagggcagtgaagtgtggttttacttttagggcactgagctcaagccaagcttgttccatggctggggcatgacactggtttcaacaccagccatctattcatggtgatgctgttactccttaaaaacttgagaaaatatctggcaccctaaggtcaaggtggtttactaaaatgaacagcataaaatgctaaagatgagaaaatccccatgtgcaaccacccatctgtgttctttgatagaataataatatgagtgtcagtttggtccaacagaggctgaattggactggatggaagggttgctggataccacggggaactgttccatggaatgcagcattgagggaacttgttgaggagtggaagggaggggacaaagagatctgagtaataaatctagatttatatgcccatcccgtaaatcatgacgagtcaaatcagtttttaaaaaaatcagccaaacatttttcaatactttcactgactttttattatgatttttttagagacaaggtctcactttgttactcagtctggagtgtagtggcacaatgatagttcactgcagcctcaaacttctgcactcaagcagtcttcctgcctcagcctctcgagtagcttggactataggagctcactaccatgcccaactagtttaaaatattgttttggtaaagatgggggtctcactatgttgcccgggctggtcttaaacttctggcctcaaccagtcctcccacctcagcctcccaaagtgctaggattacaggtgtgagccactgtgctgggactgactttttgatcaagctggcatggtgaaactaatattaacagtttacatggacacaaagataaaagtgttagctgatatatatatgtagaaaagtggctttccccactttaacagggctcttaggagggcaatagacatgctaaatggaggtgggccttcctggtgccccttttggttgtcctgtaatgaatggcaaagttcagccaaggatcaactgcaaactgagcttctttactgccgaggagctggccagagctagtggtgtgcgcacccagaacctgcaatgtctatgggtgaggcttcacttaagacaggaggcctctgatgtcaaccccacagctctgagctgctggaacatctttggggctcaatttgggaatcacctttcacctaaaaatattttttccctccatctttcagatggagatttgcaacattcaaagtagagccttacaattgtatttgctgccctttcctatgctccaaatttggctttaggctgcctattttcagtgtttgggaacctcaaaaaaggagcaatgcataaaacttccagctgataggaatccttccccagggcttgtcatttagctgcagctccagcaggcattttgaatgaaggggaaaaaaggacatacagcctcgctaagtacaggggccttaaagaaaacacggttcttaaagcccttttgtcctctgtctatctgtagcacaggataatgaaaatggatacgtgttgcctgttgttcctatgtaaatgctacctcgaggacacagtcttcaccaggcagatggctaatttctttgctctaacctcatttctccagtattccggtgttcctgtgacgtcctgctcctggagtcaggtcctaattgttgtcaagcgttcagagacaaaagtggtgtctacacatcattcatgtgaaggctgttactggctatgaactgtagttgtggtggcagcagcagtgactgcagtggctgcaacacaaaccttatggcaggtagtacctgctggtgtggggctgctcagaacctgcctttctgcttccaagtgtcaagctgaacattttcctttgttatcgcttccagcccctggactccaacgtgctgaaagccctgtgtctttctgttgggatcaatacccgcttctttaactgttcctctctggttcagactgtctctcggcatcattctgaccatgcaaatctggggatgcccaagagagggctcatttgtcttgtcacagatttggggggtgctggttaacttgtggccccttggaaaccccactgccaccgagcagtcaggtaatcctaatagccaggaccctcccagtcagcgattggccgtctgattggatgcacattcatcttcaagttatgttgtgtgacagcccgggctgctgaacaccattttaacatgcagattgactcctcggaggctcttcattacgcatttagcggtctgttttcagactaaccagcatgtcagagaggcccgctatcctctttccacctgggtggaggaaatagctcactgactgtgggggagccacagatattaaaatgcatatgtttaccttcctgagcatccgcacacaacagctttctctgatgcaagagaagaaaaaagaagaaaggacccttggttctgaaatgcaaggaaaatggctagcaaaacaagcgagcctttgttgatgagagcagtcaacaaggccaggcccgcctgatgccgcccagctgcccgcaagccgacctgggagcgtccacacaagcactcctcttatcgacacacagaccctctctttctctctcacacagagcctgaagcattttaagcagaacacttccaatttcctgtttctaaaaccatcttgcctctccagtggcattccaagcgatcctggcgaggcacgggatgagggagaatggtgttggtttaggtggcttccactgcagggctctgggcttacttgcgaggctccaggccccttctttacccacccctcttctctccctgctgtgattgacttccacttgctaaaaatacttccctatggcctctcgttgttcctgcatgagtgctgatgttttcttgtgcgcgtgtgtgggtcgcctttctcaagaatctctttccattccttaaaaagaaacatttgtattgcttttaatacaattctcatctcttcccacttagtcccccaatgtactattctctccattcttctgaaggaccaattaaactggaagggtactcagttctttgggcctttgctatgcgctacgccttggccaagtctgcagcccctgccctcatctccgatcactctcttgcttcatttctttgttgtcaccagagaaagatcctggagaggtttagaaggctagcttggttctcacaagtgggagctaatgtgtgcacgtggacatggagtgtggaatgatagacattggagacgaggaggggtgggagggtggaaagaaggtagatgatgggaaatctctgaatggtactatgtacataccttattcgggtgatgtatacactaaaagcccagatttcatcatcacacaacatagctgtataacaaaattacacttgtaccccttacatttgtacaaaagaagaaggcggctagcttggacacaaacactcatgaggccagggccgatacctggattcctaactgacagacacccagccacatggctcctgggtgctcaatgtctgaaccacagcctgcccctcagcttctgggtcctcccacacggtgccggatcctgataccaagaccgaggacatggatggggttttgctgtttacatgcttaaaatattaataatcagagttcactttcatagggctctgggcagaaaataaaatgacagcagagctgtattcctaattcccctggaagggctgtgaaggaggaatataatggttccctatgcttgctctgggatcagagtgttcttgatgagtgaattgggcagtaaacacagctctttatttttgtacggaatgtggtgatccccactggcaggaacaggttgcatgtggttgctgggctgttgcttggctggtgctgcactgcggagtattgtttggaaaaatatcacccagcacgaacaatatggctccccagcgcctggggcactgcatggagagatctgtcccttcattcacatatctctgcactaattttttttttcctgtgataaaacagatttcctgaatttaaaatgctactgagggttttgggtggtggagctatgctgtgttttaagaagagtccttgattggcaagtgagcagggggcagcttgtggtttggaagcttctcatacacagagaagggggcctgggaattctaatgacaatttaatagcggcctgccacatggtctagggaaagtaattaaatcttgaattttaagttcccgatggtaaaatgggggtgttatggactgaattgtgtctcccaccaaaattcatatgttgaagtcctaacccccaatatctcagaatgtgactgtatttggagacagggcctttaaagaggtaattaagtgaagtcattagggtaggcactaatccgatatggctggtgttcatctaagaagaggaaatttggacacagacatagaagggtgaccatgtaagactggaagaatatggctgtctgcaaacgaggcagaggccttcagaagaaaccaacctggccaacagcttcacctcagccttccagcctccagagctgtgagaaaataaatgtctgttgtttaagttactcaggctgtgggactttgttatggcagcccaagcagactaagacaaggcgtatgagtgctaatgtgctttaaggatgtgagaaaccatggaaaggggaaaagtggagtctcacggtatttgggggattgatttcaggcatcattttagctgatatatggcttatgaagagtggccagtaaatctcagcccagatgctaatttcacagggactaggtggaaattgggttgttttctgttggctaaatacctgtaaaagtgtggttgctctttagcttcttgtgcgtaaggcagaagtgacatcttgaactgagaaaatgctgtgaaggacctatctggcccttcaaataaatctctagatttttgtttgagccaatcaatcagttctccaaggtgtcagctggtaacagacatatctgtcaatacaacagtactgccgtcaccgggcaggctgtgttcacagcaggaagcatggctcagtagttacttatatttgggaaatggataacccgggattatgggtttcaggaggtgaggttaaagtggggtcaagggccaggttaatgctagtacagtttccactggagaaagacagcacgatatattgactttagggaaacatgtttctagccttgctccccacccctgcttattccacccggggacatcccttgtcagagcctacaccagactgtgcctcagagacacagccctgccaattgctgcagtgggaaatgctgaatcatgagagtacaggtggaggaaaaataaatattctgtatgtaatagaaaaattgaacatgcctcagttgggtttgccactgagcctttttgttcagctttcccttcccggctgtgagcagcactctactgaaccttcctcgttctgcagcagcgctccgtcctgcgccccacaggggatttccttacacttcacttactcattctcagctgaacagacataaatgttaatgtagttctgtgccccttaatcaaatacaggtcccctcctggaacagggagatctacaactacggaacactggctaaagaccatcttctatctttgttacatattcttttttgttgaattcactaagtgttgcctttttataccatgggacactagaaccaaggaggaagtagccctttctaaattattattattcctgttctctgtatcacaccttcttttccttcttcaaaaatgccattttccaagtcagcaagcttatataaatcccaagtctcactacttttctaaacaattttcaagtctcttttctgggatttaatatctcctgtgataacccaaactggacacagaatagcactaatgttttatatgttatcttaaattttctgtattattttttattttaaccccaagcatcctattggctttttaaattgctgctgcacaccagacagatattttccccaagttatcaaccatgactcttaaattattttactatgagttcagagcctatcagagattatgagaagtttggattatttttcccaaagtgcattactttacacttaaccaaattaaatttcatctgctttcacactacccaatcccctagtttgtttagctttgcctgaagtgtctcatagcaatccttaattttttattaaccatgtcaatttgaagctttgtacttaactctctactttagggcttttgccatctattcttgttacacttttggaaaccagtgggttttaaaaggtgtagaatgaagcattatttggtgagattctatgctaagtgacatgtaaaagatcccaacaagttaatgaggacagtcctgaagatgaggcaccagagtccaattcaacctcaagaagcacctttatttctgtgctgagaataaatgatcctaaaatgtttcccatttcttttcgatattacattgaaaactcagtgagaaatcctagcagacagctcattttcctgtacaggcaccttctatcctggcttcttttccaacctgtggtggcaacagggggcttgtcaaatggagccttccgcactccctcccatttctctctcttcaaggtggcatttcttttaattgaatagaaactagaatcagttagtttgctagatgttttttcatgattatttcctgatttcttatcttagataccaagagaaagatatgtcacatcctgtctccagttcttttctcctcgctgtctccaatctctttctctatatatcctgaagagaacctcacatctgacagaatgaaatcctcccatttttaaagttaccaataagagtgtggctaaaactgctaggtgcctaccattgtccctatttttagctgggcctgttgctagcaagctaaaagactataatctttaacttctcttgcagatagggatggccaagaaactaagttttggtctatgagatacagtgaaattttgaatagcttttcttagaaatttccgtcaaagaggacatgcctccttcttttgttcctagaacagaagttctgcctggaattcttatgtgatggctggagctctagaagccattgatagaccatgagggtcacaacctagggatggcagagtggagagtgggcttgagttcttgatgactttgtggagctgccagagtagccctggatcactttctttgtgaaagaaaaataaactatgctgtttaaaccactgttgtggggaagaagaggaggaaagaagacctttgttatttgcagctgtatttaatttttactgatacagaaagacttgacttaggtttatttcatataaccaaggccttttaatgctagagtagccttagagatcatcaaatacaatcttttcaaatacaggccaattcgttgtatttgctgaacacctatcacatgaaaggcagtagactaggtgtcatagggtatacaaaatgctacaaaatgtggtttttcccttaaaggagatttaatcactaagctgataataacacaggcagaatgtggcaagcatcttaaaagaggaactcacagtgttccacggaaacactgggaggattagaattgattaggggttggggtggggtagtctggacctaagaagtcttcacaaagggtgttggagctgagtctggaagaagagtagtatttcacaagaggggtgggtagagggcaagcagagtctagaaagcagaatctagaaagagggatcctcatgagcgaagcggagcacacagcaggttgagtccgtgtgtaggagctgctagcagcccaatgtgactaggcacgggtggatgtgaaggcatggcagggggaaggcctgggtggggacactgcagggttttgaatgtcatgtaagcagttttaaaaattattagtctgtaagtactgaggagccactaaagtcttctgaccaaagaagtgatatataattttttttttgaccatgtcttggaacagagagagaaagtattgaagattaaacagaacagttagaaagttaattcaaaagttgttttttgtttgtttgtttttgtttttccaacctcaactatggcaatgttggtgaattcagaaaggagaagggtgatgaaacaggtgtggagggacttggacatgggggtcgaaggtgactaaacttgggtgactgagaagcttgtgaacttgtcaactagattttgaatatgctgagcctgaggtgccagtgtgagaatcccaggagaagtctagctgactgtgggaatgtaggacattcagaccttgttgggaagctcaaatggaaaactgcaattattcaggcacttttaactaacgactctctcaggacccaggaccaacaaatttctttgaggatggtgttctcatctctggggcagacggcttgggagaaacaggtaggggtcaccgaggagggaaagggccacccacctaggctgtgagatgtgtcaactccaccctagtgacatatatatatatatatatatatatataaataaatatataaaataaaatatatacctatatataatatataccctatatatataatatatataccttgccaaattaaaaaaatttcctgagtaatctttctttttttgctttatgtacagaacaaaccactttttttcattgtagaaaacatacataacataggtactattgtaaccatttttaagggttcaattcagtggcattagtatattcacgatgttgcgcaacatcaccgctatccatttcagggaatttttcatcactccaaatagaaactgtatccattaacaataacttcccatcacctttccccgcctgcacctgataacctctattctactttgtcttatgaatttaccatttcaggtatcttatatagatggaattgtgtaatatttgtttttttgtgtgtgtctggcttatttcacttaacataatgtcttcaaggttcatccatgttgtagtacgtatcagacattcattctttttgaagactgaataacattccatcgtatgtacataccacattttgattatccactcatctattgatggacatttggattgttgctaccttttggctattgtgaataatgctgtacctgagtaactttatattaaaatcaccttagccaaccagctcttgactgaattcccacagaaacatacagaaacctgaaaatttttatagtgtcctctttttgttctgggagttttgcagaagagatgatatcatttaaagagaccagattagcaacaaacagaatttttgaatagaaaactaaactgatataaaattaagttaggcttaaagataacttagatagatattttgtttaaatatcttttaaactcttaatatgtactgaactttaaaagttttataataatggaaacttacccttatataaatcttcaaaatatatgaggtacattctcatccattatccttacatcatctcatccaccgctgggtatggtggcttacgcctgtaatcccagcactttgggaggctgaggcaggtggatcacttgaggtcaggagtttgagaccagtctggacaacatggcaaaagcccatctctactaaaaatacagaaattagccaggcatggtggcacgtgcctgtaatcccagctactctcgggaggctgaagtaggggaattgcttgaactcaggaggtggaggttgcagtgagtgagctgagatcacgccactgcactccagcccaggagacagagtgagactccatctcaaaaaaaaaaaaaaaaaaaggcacccattatctaaataaactgtcactgacttataaggttataaatatatttcctctaaaatataatataaagaagtttcataatacatgtaagaattcccttcagtgcatttatttaccttttcaagatagtagtcaaagcagctttactcataatacagggaaatgtccctcctgaaagttaaccactgagctatttggtcacaaagcacattattctaaaaccagtattattccagaaccctgagcatattttacagtatttccagcccattgtattctagccagttgttctgtatcacatccttaccaacataagctattgtttagcagccaactccccagcattgttattatagatgaatgtgttccttcccagaacagcccactgcagacaggtggacatggtaattacggaggctccatctgttagtggtgctggatatactgggatctctgtttgaacttagatcctttgagtatttgggcagatgcatgttggaggctagagaaatattaatgcagacagcgctacatacatttttgttgcattgaacaaatcaatttaactcaattaacatttattgagtacttgctaagactcaggcactgtgttggattccaagcatgcgattcagctcatggatatatggagagagcagaatgaaaacatttttactgtcacacaaaaggtttgagactcaaactcatagtagattaaatctaagagatctgagaagtcatctactccacttcctcctataacaatgagcaaacgatatcctttacagatagcatatttaaaacaatatagatggttttggaacagagatttaagctgatgtcttaatatcaacttagtttaaaaatatttaggataaaaattttgtttgatattaatttatgatcctcataaggatctgagttacaaacattctataataatatatctcacaattaaacaaagtgaattaaccaccatggcatagctattctgttctggtctgtattttcagatatacagcatttaaaatgttatatacttgctgcttataagctacccagacagcaacaaaacaaatggaatgtacaaagtgtggaactaagccaaaagcccttctttttctctttgttacatgatttttcaaagctattaatactgttaacattgcactggatagtagaattctagttctggtagaactggttttcttttctttctttcttttttttttttttgagacggagtcttgctctgtcacccaggctggagtgcagtggtgcaatctcggctcactgcaagctccgcctcccgggttcacgccattctcctgcctcagcctcccaagtaactgggactataggcgcccaccaccaggccaggctaattttttttgtatttttagtagagacggggtttcaccatgttagccaggatggtcttgatctcctgaccttgtgatccgcccgcctcggcctcccaaagtgctgggattacaggcgtgagacaccgcgcccggcagaactggttttctttaagaatgctgatgaggatgggtgggcattacctcactggtagagccattcttacttatccaaagaaacgaaacacatttattcatagtagagctacctactgtgctatgctcttgagccacacctccctccagcccctctaccttaaatttagagttacaggttcattggaaagagcatcaacccaacctgcttacatcagagacctgaacactcagtgtgactgtgcgaactccccgtacaggacatttattaatgctagtatgcactttctccctcttagtaataacattccagagtcctcttggggagaaatctccattgactttgtggaactgcaaggcaaggtgcctagttctccaatcaccaagatgtgcacacatgacccattggccaagtggacactctctcccaaatcttcgaatctcaagcagatggatgcaaggatggaaaacagctggaatcgactcatttcagtggtggcatcttaaaatcctaaatactaattcctgccaaaagagccctagagttttctttattcctgtggcttttccaagcctggctctgcattgttctgaaatctgtgggctaactaacagctttgcctaggttcacctgagttgattttcactgctttctatcaaagaacctaacttacacactatctgagtccagaaatacagatctttagctccagagggtattaaacacattcttctgtaatttattcatgttagatcagcaaacatctataggtagttgtttgaatattccaatggtgttcaatggtgaggcacagccctaggagaatattattatggttgtacactgagaatacattactttctaataaggaaggaaaagaaaaaaaacgaacagcactgtacatcttggctactcaccttttaacagtagccagaactcattgtcaggaagttctcatgtacctaaggaacagtcctacatggatattccatattcatggctgtgatcccctggccttgttatgatctttaagcaacttataaatcattatcaaaagaagattacactgtacttacttcattttaatacaacatattttgcttgaaaaattataatattcatgttcagtattctagttacttcaataagatgaaccagaacaccatattctcttagaatcccagataacagacaaagtcatcacacacttctggtcaaagaacaatgatctatctgggaaggctcttcttctctctatacagccccaggaaggccacatgtgggaaggtgaggagggaggcagacatctagtcagctgattcgatcagtaaaatcaacccaggccatcagtggggtgcctggtgtcccagtaggatcatcttcactcccaatctgactgtgcactggataccaggtgccttactggcctcaccctggtcctgatcctgcctctatatcaactcccaggctttgcttaagcacactgttattcctaactgcttccatctccaccttagcaattcctatgctctaaaatgtcaactcctatgacttactgaggcagcctgcaaatttgggcttttacttggtctgaagagctcttgtccagttttcaaaatgatttcctactgggaaaatgccaatctctctgctccctgtgttgtggctaaaatgtagcttgaggtggcaaatctgtgttccacgctggaagagcacatctggttttgatttttgcagatgacactgccaacagtctttgctcctctgtggagctggccaagattgtttctgtcttcgtactgcttaacagactagggtcaggtgccaagaggttgcctgtcctgaaagcttcttttctgaatgaaggtaagaattggtggcaatgacacctagaaactcccaaatagctgaagttttcgaggaaaaaaaatcactgtgccttaccaatatagttatctctgcttagacagtgactgagactgaagttatattgcttcttccccagggatcagaaagggcagccacagagttaggtgagaaggcacagctgaagcgatggaagatttacatcatatctgtcagcatgtcaataacccatcctgaaattcaggaaaggctgaaaaactgtctaacttgaaatttcattaataattgtaataaaaaaagactaattcgacaataacctaacataatgttgaatttcacagacattttattgaagaggaacacaagcaagtaactttggaagtcccttaaagtgtagacttctggctgttgatttttaaaaacaaaagtataaggatgtcaactaaatttgaattcaattgagtggttcatgctttatgtgccatgcatattatacacgaaacgtttctgaatgcattttagttgagtgttaagggtgaaattagaatggtttaatatttggaggcaatttcctgttaaattgtcaaattcatcttattataggagcttctggggaatgtttgaggcaccacggttcttgtgttcttttatgggagtggaagacattttcaaaaagtcacaatttctggtaagtaacggactccattcttttctccataacactggcagacattcttggcatcagcctgacaaatctccctaccacagagatgcagtgtcttgaaagctgcaagcaggaaacaagcttctgtctttttagcggacctcctgaatgaggcttccagctgaccccacttgcaacatgcggtagtaccatattgttgtggagatgtaaaacccttctggaggatcctaaattactctaggagagggtggtgtgtaactacgcatgtatgtgcacacaaatgcacatgtaaatacacacattctctctttctgtctctcacagacagactttcccatttaccccactataagtgtgactgtatcttctttagcacaggtatgtaataattgagggcatttgggtagcacgtggtaaccttttttgaggctggaaaactagtttctcttgggcaatgtgaggtcaggtttcatcagacatggaaatgtgggagcttcatgttttttcttctagaatgccatttctgtaattttgtataaacaaaggataagatctgtctctgacactggatcagattcgttatgctttataatctctggcttacagatatgatgactattatgaggctttaggaactgctgatatctactagggctttatagagagaagaaacttcgaaaaaagaagatattttacacttcacatgtctgacaagggtgtgtggggccaatttacagcaggggcttaatatatttttgatgaaaattgctgcaatgtggcacacagattaaagagaaaatagctattttgtaatgacagcagtagattctgaaatgaagcccagctggtacaaagatcctacatggatttcaagatacactaccctcttcccaggctttacaacagcatttaaatgtcctccaggctagagtaccctatcagagatttccatgggtgtgaaccttgtggctccaccctcagaagtaagggaataatctagtgattcgaatgtgttgaaaaatcaaccaaccgatcaagatggatttggacagaccatggtttagcttgccctaccagaacctagagcaaatacctaatatgatataatgaaccatgaggtagaggctagttctacccctctacaccagcaattgcaaaaaggttacaatatatatgctttaaaatgatcgcaaatcaaaagagaaatgatagtcaccaaagtcaagcacagtgactggaatacagcaagaatgaatgaatgaatgaatgatgactacaacaaagacccagtagttaggttttccagatcttattttgtatctgagcactgggcttggacacagagagccataagtaggttatttaatttcccttaaactcaatttcctcatctgtaaaatggtcctggtaattcacaggattgctgtgaggtctaaaagtgatgatgtcaacatgcctggccagagcaggtactccccctacatgacattgcttactgaggctgcagccttcaatttgttcttacaattgaacaaaatattatgtatgtcatgtgaaacttgttttacagtttatctcaacctaagttggcattattttaaagtcataaaaacatgataaaaatacacatatacacatgctgacatttaactaataagagtccagttatggagtgatcctgaccatctgagcgaacatgtcagcagggtcatgctacatataggatgtggggtcagaaaagtaaggtgagaggccacagttaggatcatgtacaagctaataatgtcacatggctaaagacacacattcccatggacactggacaatgggctgagtttttttcaacaaatcaaaggcatatactacaaaggaaagagtgtgtatgctgttccagagtaagaggcttaatccaaacaccacatccttggtggaagggggtgttctcccattcatagcaaggacacagagcagccagggcatcgctggctggctgtgagcacagagaggcagagaccagattgaggggtagttcactttttcagaaatacatactctgtatatagaggtaaattgatatgatgtttggttggaacttgctttaaagatacttcaacaagaggaaaaaagaataaacaaaataaatatgtctatcccctgcaccccccaaaaaagacttgaagatgtaacacccagtgcaatggtttgaatcctaaccaacaataaaaagcatttttgatgcaatgtatttatagatgaagcaatgactatgaattctgataacagtgataatggcattgtgattacctaagaaaatatccatattttagaattgtatatgtatatataaaaaaggaaggggtgaagggacctgaagtataagagttgctttaaagcacttaagaaaaaaagaaagaaaggaaggaaagaaaggagagagagagaaagaaagaaagaaagaaagaaagaaagaaagaaagaaagaaagaaagaaagaaagaaaagggattaagaaagcatggcaataccttgataattgaatttgggtggcaggtatacgggagttcacagaagcagtccctcaacctttcttttgttgaaatgtttttcataatacaataagaaaaaaatcacttacgctttctgagccttggtgccaagtacttggaatgaatggtaactattaggttgagccatatgaaactgctatttttgtagatcaaaaacagttgaatatcaccatctttaaatggtcgaactcaacccaaaccaaagactctcaaaatgcctttcatctctgacattctatccataatcctagacagagctaaactctgcaaaaagttcagtgtccaaagttgtcaggcaatactctgcagggacaggtaccacactggcccaccttcaacaacagcttctatggtaactgtattgtcaagtgcaacagaaagacaaggtcatcacaaaggccatagctgttgccagccctgatcactggtcatgatgtgctctccctatgcaatttacctgggaatctcccttatgcatgtgtcacatcattcatagtctatgaggtaaaacaggtcagggccaattccacaaaaacaccacttcctcctagtacagatggtagaaaccctcagagactgacattctgccagtttctaaatttagtcctagccttacctccaaaattaaacaaaatagcaaatacttttggtattgtacttcagaatagggaaagttgtccaatttagcagggatgtgtaaacatttcctttctcatcctgatgtcctaccaggccctttcatggccttttcccattaaattttgtaattttaaatatcttatctaataagtttatttatttacctgggcagattaaatgcagctgaattccttggtctgtaagtgattagcgtaggcagttaaaagcagcctaaacttatgggcaaggttttcagtttctatcccgagcttgcttctctgttccatggttaataagagcattccaactctagccagccttattgtaacctctggtcctctatgttcaaagattgggtgagaacattgaaaagcatgacttttattgatgtaggtgagtactgccatttttttgtgaagtactacacataattaagcgaccaacttctaaagcaaatcacttttatgagtgataactgtttctatttgtttgggatcaaccgtccttggagtgattcttgcaaagaaaaatatcctgacactatacatcaacctaatgctatgaattggctaatgataaaggtagctattctactttcaaggttgaaacgactgaaatcaaaacataactagacaaatgctcacagctaaagtgtgtactgtgcatgtgtgtattaaggaaaaatagatagatactttaaaccctgggcagtggaaagaaaacccaaaaatccaaggaaggcagttaactaaattctctttctgtcctcataagacagtacattttcaggttcatgtaaggaaaagtgaaattgaagcttataaattagaaatggatgagactaaggcaagagaagggaaggaagacaggaaggagatgcattcttatctttcccccaaggtcaaagtgatgcacattttctattctgtggaaactcaagactggacttttgaatcaaccaattccctctgacatcaagtgaggagggcaaggcacagctgtcagtgatttcaattccagtcctttacaatttcatttttggaggaggggctctcagtaaaccctgtgactcctatttaaacagaagcaaatgcactttagtatttaccctcttaagtttcagaacaagtcagggaaagaggagaaaaaaaggaatatgagacaaaatatttataatatcaggaaaaagcttaaatctttgcatgaaacaaaactgtactgcaagggattgtatttattcttccacaacactaaagaatatataaatatattattaaatttatgacaaaccatattttcatttcagtaaaaagcagaatcagactgtttttttcagaccttaacaactcatacttagaaaaaaatgttacgtgcatcaaccgaagtaaatattcttgaatgttccctggtaaacgttgatgaatgcagtgatttaggagtggttagaacaggaagaaggccatttctatgtctagattgtttaatgattacctgtcccgtcttccttaagaaggcagagagtgttgcacagaagtctacttgtgtggtctcagcaaaggcaaatttataaagattttgcctttccaggacataaactcctgtgtataggggctgtctcaaatacctgtgcacttagtaattgacttgatgatgagaataaatgaagatgaaaaagagaaattcatcacttactgaaaagtataaagtttctgttttaaaagttttacagagcagagagagattttcaaaagaggaggagaacagagagctgcacctcttcagctgctgctcagactttagcaacgaaggaggcctccgtcactggaagattgtacacgcaagataaaacaatcagaaaggcctccgatttgttttcatttgaaaactcaaagtcagctttaatttctgaaagaaatgagagataatgactcaaaatatggcagactagctttacaaacagccatttgcccaaaatgaataataattttagatgatgagttgtaaacaacactgatttcatttattttgcaaccagtaatcctgttgaggagagacaaggctggcaaattgtttgagctatccgtgatgtttctggcccttatttgcaaagttggaggaaatcctggcagagagaacataaaatgacattgggatgctgataatgagctctatgcaggtagggagatttgtcagggatctggcctggtgcatgttgggcttcagatgcctggattggactgacagatccagttggaatctgcttacttcttagaaataaccaggcttctaagagtagctaggagctccctatgggatgtgccagtttcaatggcaaaagccacttttagcacagggctgtgaccattcttaagatctcctcttgagaggacactgagttgcctgacatggcccccaaaaagggctgccagataaaatatagaacacccagttaaatgtgaatttcagatgaacaacttatactaacatacatatatactaaagaattatttgtttttcatctgaaattcaaatttaactgggtttcctttttctgtttgtttgttttctaaaactgccaacccttttcctaagacaaggaaacttctgacagggcaggattcagctgcaccaccgctgtggggagggatgaaacctgcaggcaggaggggaggggaagggaggagcataaaacatgggctgagaaacagtggactttttccgtcaaaaggaaagccataatgtatatcctagtgaagatggcaaaactgagaaaagatttcagatttgggtcagcatccaagggagacctaatttgaaaagagcaggaacagggtgtgtgtgggtgtgtgtgtgtgtgtgtgtgtgtgtgtgtgtgtgtgtctgtgtgtgtgtgtctgtctgtgtgggcaggcacatgtgtctgttcatgtttgtgtctttggaacttacgggtagcagtggtgcttaggatcagcagcagacagaatgactaaggtgggaaagttgttaaatgagaagaacaggtgacaaacaggagtacagtcttgtgaagagttaattcctaagtacagggcaggctgctgtataagtctaggctccccatgggtgcctgagctccccagatgcccaagagacctgagcagaaaggggccagatggacagacagactgcccacttcagaatgcggctgcacatgtgattcagggggttgtaattatttctcaataccaagggttctctttggctatagggtttcaaccctacggctcggatcggcaacagactacttctaaattccagagtctagtgaagggggagagctctaactctccagctccactggggtccagtttcttacagaatggggtagcagagaggaggctggatagcctgaagatatcctataactgggacaactggaatggcgcttgttggttcttaagttggctagaactgcctcctggaagatcatatacatcttccaacgtgcacctctccccgcagtgtctggctgcagcagggttaggatctatcactgtgttcctttctctctttccttggcttcctatccttcctatccagttgcatctgttcactgttttcccatgagcaactcctccttgcttgctgccatgcccgacttcctctcatcaccttacctttggcttactgcttttccccttgttcactcaatctctgaatacttctctatattttcctctatcctaaatattggaataataaaattacaaagataacgaacaatccctatttcttaaaaaaaaagaaatcaaaatgagtacagttgtttgttgtaggagcaggcttccctgagtgcccctgcagtggcacagccttcctggtgaggctgccttgcagcctgtgagagatggatggatggtagagtggggtcaagtctgggctgtgctgacagttaagtgtgggcctccagccagttaacttccattccttcattttaaaaatgaagacaatcattccttcttaacaggactgttgagaggattaaataagatgtgtatttacacattaaatatatacttaaagtgctttggaaactgagcagcatgttccaaatgtaagaggtattattacctaaaagacaaaaatatcttatacctaattttactctatagcaaacagtgttaagtgattacatattatggtgctgagaaacggtataactatttctctttataaatgttaccccctccaatatccagatttgtggctcttccaacatgcttaataacaggaagtggtgaaccctccatgaggtttttggaccaatttaaaatgcagtgactgggcacagtggctcacacctgtagtcctatgaggcgggagaattgcttgagcctgagaggcagaggctgcagtgagccaagatcatgtcactgcatgccagtctgggcaacagagtgagaccctgtctcaaaaaagaatcatatataaaatataaaatgaaatgcagtgctgctggatagaagatttaaaagaattttttaaaatcatagtttatcataaaccttcaaatgttacagattaccatttttggaaaaaaagatttttatacagcacaacaaaacaaaaacagaacccctattatgaagttgtaagagttgcgtgttctttttcttgggcataggatcatagagaacttctgtcagcaggcgtttgggagatgtgtaagttaataaccatgtttgctaggaaaacaggagagagggctaattagcacagggagcctggctctggtgaaggatgacatgtttggtgtatgcagggtggcagctgaaagttactaatactgccacatacccccactgtgcttctgttaccccagttctcccagagtcatgatgaaaataataacaccacacagcactttacagtctataaagtgcctggctatgtatgcattacacacatcacctcattatatcctcttttaaagcctgtaagatcagttttactcctgcaactcaatttcatagaagaggaaactgaggtcagagttgaagatcttgcccaaggtcacacaactgttgagtccagagctaaatctcaatgtggggtcttggttccaaattccacactagttcaacacacccagctcacaccatgcaggcacactgaggatgcagggatctgatatgatcttcacatgtagagtgcagaaaggtattacagaaaaagctggggatcggcagacccaacttcctgccttggctctgcccctgaagagctgtgtgcccaaaggtgtgtctcctcagcactttgggcctcagtcttctcatctgatgagtgagaaggttggagtagctcagtcattctcagctctttttagggtcttaaatagttggcaaccacttgaaattcagctatagactcttccttcagaaaaatgcacacatgatacacacatacacaagtgatctcactaaggattttttttttttttgagacagaattttgctctcatcacccaggctggagtgcaatggcgtgatcttgactcactgcaacctccgcctcccgggttcaagcgattctcctgcctcagcctccagagtagctgagattacaggtgcccgccaccatgcctggctaatttttgtattttcagtagagacggggtttcaccatcttggccaggctggtctcaaactcctgacctcaagtgatctacccactttggcctcccaaagtgctgggattacaagtgtgagccacagcgccaagcctcactaagaattttaatacattcatggatcccagtaagactagatggcttgggctagttgatttttaaggtctgcttatactctaaaattctatcatacatcctctttctgcaagcatattaatttatatctgcttatagtctcatatgtatgtatacacttaagtagtaggacactatttacatttgtaacagaaacaatttatgttttgggaaatcaaaagaaaagttttactgggctaaggtctgaagtgtggctttagaagtagaggatagtgtgtctagaacagtgctgtttagtactcacaaataacaattaatttaaaaatgatgctgggcgcgatggctcacacctgtaatcccagcaccttgggaggctgagacaagcagatcacctgaggtcagaagttcaagaccagcctggccaacatggcgaaaacccatctctactaaaaatacaaaaattagccaggttaggtggcaggggcctgtaatcccagctattcaggaggctgaggcaggagaattgcttgatttgtaaccgggaggcggaggttgcggtgagccgagatgtagtcattgctccccagcctgggcaacaagagcgaaaatccgtctcaaaacaacaacaacaacaaaaagaatttattataagcatgaatttcatttgtctcctgtttatgcaatgactaaaagtggtatgttattaggaatagtcactgatggtgacacagaaatagaagttggacatttcttgtctgagaaataataccttaaaatgggttaatttaatccaattagttttcagatagaaattatttaattactaatgacttctggcttgtcaggttttgctgggttttctcatagtctaaccccaatttagctaatcaagaccctctttttaaaaatgccactttgcaatgatttcagaaacagaaataattaaacacttgagttacccaagaataaccttaataagaaatgaatagaaactacaagaagaaaattagagaatctttaaaaaagacttgagtgaatggagatatagttcttattcctgaatgaagagactgcatattgtgaagaagtcaactcttcccagaccattctatagatttaatataattcaaatcagcattgcagagggattcatttaggaatttaataaattttttatagttattctggaaaaataaactgggaggagaagctaaggaagctaaagaaggcaatatgagatgttagaacctactgtaaaaccagaataatggaatactatgcgagcggtggaaaaaccaatagttcaatgcaagagaaatgatagtccagaaggagatcttaagaattcattatctgttaaaaatatggggaaaggaaagattatgaaatagacaagaataaggggggatatctgaagttagatttgcaccttgcaactataccaaaatacatttctgaagagcatataattaaatgtaaaaaatgaactccaaaaacatttttaaaagtcagtatttcatgattttggtataaagtctttctaagtataaaataattagaagttacaagggaagaggttaatagttttcattgcataaatttttaaactgtacattaaaaacccttaaaaattaacaagcagattaaaagctaggacaaaatattggcataaatgcaaatttataatatgtaagttttttagaaaaagaaatatatatcctatttttgaaaaatgggcaacagacatgaatagagacagtttatgaatgaaaaatataatttagccaataattcttaacagatgttcagtctcactaatgatcatacaaatgcaaattaaaagaacaaaatatattttttcactattatattggaaaaaaattaaaataacaattcctaaagctggataagatgtggtaagggagctcattcagtaggcaagcataaattgataagatctttctggaaaccaattatacaacacacgtcaagatcctagttaataacttccaacccagaaattgctcttttaagaatctacactatgaaaacagtcagaaattccactgaagatagatttaaaaggatgttcgtaaacaacaaaaggtaaacaactaaaatgttcaacaataggtgacagattaaattttaaataatttatgggaaaattatgcaggcattaaaaatcaggttttataaagaatgttaaatgaccaaaaacctcaataatataggtgaacaaagtaggatacaaaaccaaatgctgttggatttaatgctgtctaaatcaagacattatatttgtctcatatgcatagaaattaactagtatgcatcacttccaaatgatacagagagatcatcttgaatggtaggattatgcatgattttaaaaacacatcaggtgcatagttctttaaatttctaaaataaacagactttttaggcttaaaatattatgtaaaaaggaatttgttaaaattcaccacaataatttaaagagacaatatacgttcagtggcaaactaaattagctgtgtcatcacctggcttctattccagtttctgccacttgttggctctatgaccctaaataagccatttatcgttctctaaactttggtttcttcagcttaaaaataacaactgacaagacttgccattcggaaagctgctttgcaaactgtaaagtatcatatgcatatacgctattattttgtgtgtgtgtgtgtgtgtatgtctgagtttagaactccaacctaagtggaccttatagattaaagcaaaaatctactaacccatacctgaaagcctcgattcggaattaccttaaaccctgcacttgtttagccatatgcaggagccatctttggttcagtacacctacacatgccggcctgttaacaactggcttggtagccaagagaggaatgacaaattacatccaaggctatgcgtggggcagatgggagaaagatcaaaccaaggatggcctgagctcagactccataggatacctcaagggagcatacacgtaccctaaaacagtccgtgcctcagtggcagaagagccttgtggtggaaaacacactgcttttacacgtgagctacactgggaggaacacagttctttgccaacccttgtttgctctccttttgaagttagatcactggtgtcaaataagttgggaaagaaataaagaaggttgactttattattagcttgacaaagctaatagcccatacatgatacactccaattgttagcttgacaaagcctatagcccatacatgatacactccaaatttgatatattttcttatcaaacaaaacaaaatgacagtgaattttagcttagcaagttgcatgttcaacagcagcactgattcatagccagggctgttctataatcaggactgaagagtggagtggggaaaggtacactcctccattcatattcggctcttccttcccttcactttctcttctctatccacgggcacaatgctgagaacagctataacttgcagtgtgtggagagggatgaggcattcatctgtcagacaagctatccaatttttctgacttttccagctattttcataacataacagtgagctcaacttatccatcattcattcatccatctatccattcatgtattcattcatccatccattcattcttcaaacaactgtgtgtgcctgggggagccccccaccaacatcactggtggcctcaatattttcaatgaacacacatcagcctacaagtgaagggtgtatatcaccggcctgtggccaaccgctgcaggcaccataccacttctaagtcctgttatttgattatcaccagctttattggccacagaggggaagggatattatagctttgtggcttttcagagttcggtccttagtgaactgccaagcctcagcagcaactcccagatcacaggatgggggatttttatgaccacatctcagttctcaccagaaaaggcaaaaaggaggaagcaggtgacacattataggatacacagcaatggataagcctaacaaagccagtcactgccattccccctcttacctttgtgttctctccctcccacatttcctgtcaactctcccaacatcccctcccaaactgtactcagaataatttacacggcctcaatctcaaagagaaggaaacataagctgtttatgatattccgtattatgctttcgaaaaatatacatggctcactgagcttaccccagtgtgagcaactcctctcagcgatccctgagacaaggggtgtgcgtgtgggtgaatgtacacatgtgtgagaccagctagtggcagtggcacagggtgtgtttgtgagtgtgcatgtgtgtgtgtgtttatgagagagagaaagaaagaatgtcggtgtgtgactcccccactcactctttggagcctgagaggctctcctttctcagagcaattactacaaatgatttatgtgaccagtcaaaagggcctgccagggttcttatttcatctccagaaaaaggaactctgctggaatgttatcagggagcttgggattaaactgacagctgccttttgttttccctgtgaaagagcttctcctttggactgtggcatttggtttctacacagacagccagaacttaaggtaggcaaagactagctagacaagggccacaagagaagggaaacatttttaaatggggaaggagaggtttctttctttccttcccttctgtatttatcttgagaggatgtgctcttagctgctgattttaggaggcagcctagcttatgcgggattggaatattgtttattttttcactgtacagaagcagccacagcaccacacctctaccctctgttacccatgcttattttgctagagagaaaacaaaggccccttccaacgtagcttatggagatgtgaccctggtccccaccctctgctagattgtgcaccggcacacgtcagtcacggggcctggggcgggaaacaaggcaggatgggaaacagtccatcgtaagtacaggcaggaaaactctgtggacccaaaaccacggaaaccatatgtgttctcaccctctgagacccaaactctaacagagcattgttgttttcataaatactcagctgcaggcttggctggccataacccaccccacatgtgagcccccaccttcctgactcccacctggtttgctgtgtgaagaaagcacaggggtggtcagttgttgggctgattaaagaaatacacatttatacctgcacgtacacacacacacacacacacacacacacacacacggatgctccagtgactgcataataaagctttgtagatgaataatggtaaatacaaattgaggaacctctcaagggatcaagagaagagtttagtaaagagaggttgtgggtggatagttataaagggaagagaaataaagaaagacatggactgtaaaatcatctttatagtcttatattcagacattctagcgaaaaatacattttttttgacttgtgatttccaaatttcatttttcctaatgctttgccaagaggtatcatgcaatatgtaaaccaaaattgattttttttttttttttttttttttagagacaggatctggctctgtcacccaggctggagtgcagtggccccatcatagctcgctgcagcctcaaactcctgggctcaagtgatactctggcctcagcctcctgagtagctggcactataggcacaccaccacacccagctaattttaaaatttttttagagtcagggtctagctatgttgcccaggctgatctcaaatttctggcctcaagtgatcctctcatctcggcctcccaaagtgttggaattacaggcatgggacatcatgcctggcctaaaattaatttttatcaatatatatctgtacaggtcttcacagcatatgatactgtggtgtgttcagaaatcagagcacagagggatctgtgagtgatcacagaaggatcccagagaaggaaactaacacttatggagggcacattatgtgtcaggtatatatcttctaaatattttcccctttattcttctctacaactctatgtggtaggttttttattctcactttatagttagggttataaaaatcaagtgaatttaaataatttgttgcctactgtggtagacaccactggctgcctagctaatattccttctcttcagtagaatcctgattgtacttgaggagggattttcctgcctcccttgcagctagggatggctgtgtaacacagttccagccaatgagatgtctatagaagtatgctgggaatttgtgactggccctgcccttttcttctgttgttttcttcattttcctctggcctggagcacagacgtaaggccagcagtgaagatgtcattctgtgaccttgagataacaagcatgaggataaaagccatgcattgggtaggaagacagaaggagatatgaaataactgacattgtgcatcagttacatttcctctcatctgcctgtgtctggcttcttattacatgaggaaaatgaaactttttaaaacttacgccactgttatagagtgcttctaacatataaacaaagcaatctgaactgataccctattacagggcagagctggaatttgaacctaaatttaatttactaagggcctccatcatcctgtgtttccagagtgcacacagtctagaaaagccttggacaagggggtgagtgtgggctggtctcttcagcccatggcttgagtactattagctacttaggctgctctggagttacggtctggatctcaggtcagaatccagggaattggttggttctgatctgtgaattttagacaacttactggtgaaccagggaaacctgacttaggtttcctgggatagttctagaatcacattgcatttcttaattctgaggcagacccgtattactatggcagctccaagtggaaatattccagaatgaaggacttgccaagtaacctgacaattttattttgatgcacatagatggtaaaggtatttcttagacataaagggtcagatcatagattgcagttaaacattgaggactgaatacatgtttatctccatttcttttctactttacttctcacactccacaaaaatgacaaaagacagaattttctgaaaagcaaaactctacatattaagtgtcagagaggagacaaaaacatatatgaagtgttaacataattttgggaactagaaagtggatgaatgtgtggtaactaattcagtagagcaggaaaagctgaaattaaaacgttcagtgggggaaagccaaggagaagttagctaatgtatgttaataatcttaaagaggtgccaggcatggtggctcacacctataatcctaacattttgggaagctgaggagggaggatcaccaggagttagagaccagcctggcaacagagctagaccctgtctctacaaaaaattacaaaactagctgggtgtggtggcatgcacctgtagtcctagctactcagaaggctgaggcaagaagatcacttgagcccaggtcaaagctgtagtgagctatggttgtgctactgcactctatccaccagagcaagactctgtctcaaaaaaaagaaaatcttaaagagtctaggaattggaggcactaggtacctctgatgatgaaggtgcacatggggctaaaacacagtacgattagctgaaattctgtattagaagtcgtagaccctgagaccttctccctcatccctcattccgtgcatagtacatggccatcctacttttccctctccaccctaaaagggttggtggttttactctttgaaaaagtagaaacagagagttctggcacaaggacacaaagcgcagttgaagttgggagtgctgtaatagaaatgggaattaagtggaaatctacaattcagtggtcggataatcttacctcactccaaacctgtctggcacttggcttcaagaacactggcagccactggcagccagtcttacaacttctagacagaagcccagtagactcctatctagggaaattaaccagcctatgaggaatgactaacagatcttggattccccacagctgggtttcaggccaatcactgccgcttgagagtccttatgaaaacacagggctccaagttaggctgttagtatcttactcttcacaatgaaggtacaggtaaagattgccacacatttaaggaaagcctctaatataaaatgcagactccgaataaataaatacagagaagagagaaagtagaaaataaaagcaacagaacatttaaaaaatctctaatatattctcagaaatgtaaaaaaaaaaaaaaaaggggagaacctatgagttaagaataggatggcataaaaataaacatttagaaaattaaaataaaactcttataaattagaaatatagtaataggaataatattaaagggtgggaaggttaggttaaaaacatctttcaaaaatagaacaaaagtaaaaaatatgaaaaatagaaaagaaaaagataagaaaatagggattcagtccaaaaggtacaagatccaaataacaggagttacagaaacgagaagaaaaaatagagtagagaacatcataaaattatcaatgaaatcataaaagaaactttcacagaactgaaggacatgaactttcaggttgaaaggcccagaaaattccctgaacaatgggtgcaaaaagggccacagcagggaacaccactgtgaaatttcagaaagctaaaaataaaagagatcctaaatgtttccaaaagtgggaattagaatggcagtggactttttggtggcaaccttggaagcaagaagaaaatgcatgaagcgcttcaaaattcctcctgaaagttatttacagcctagaatcctctatttggtcagacatgtgaacagaataaagctattttcatacatgcaaggccccaaattttacttctcatgtaccctttctcaggcagtgatcagagaatacattccactgaaatggggactaaaccaagccagagaagacttggaatccatgaactgggtccccacaggatcaaggtgaagcaaaggctcggggtgccggctctgcagccatccagacaggggccaaaggatgcaggactccagaaggaaggatcccagaaagaaaaagaaatggattgattacctgatgtttgcaaatgtattgagagaagattcacccttctgatgaagactctgtgaatgatttcaggacaggaccacaaaaaactgagcaaggaaataaggaaacagagccagtaactgcagaaaaagcaaaagtggcaacagaaatgtcatcaaagcccaacatgcagctagctacagtacacaaacacaaacacacacacacacacacacacacacacacagaatgatgatttcaccaaaagttgtgatatatcaataagtaggaagatggaagaagaggaagcgtatctgagaggcagaaagagaactgtgggtaggtctccctgttccatggtagaaagtcgataagtagtatctaaaacataataatcaagagataactgcagaaacacgttatttagaagtacagattcatactagaagaagtagctaaaaatttgtaaagctttggagagcagaaatcaggatggcgatgatgcttcctatcatataaggcttatgccttacagaactctgtgatctcaagttatgtaactactagctggctaaagatactgactaaaaaacaaaacagccaactagttatccctgaacacctaatcagactgaaggtgactcgagtgtgtttaattccctcaggctttggaagccatcccgagagggtttcctgtcacgggggacgatttcaaaactcccagcactgcttcccacagatctgtgcccaagcttctcttgatttgtggctgctgtgtagatatgaacgaactgtaatgaactgtgtggttcagatactttttggtacagctacgatagctgaaaggtgggtaacaccctccccccaccaccaagacttggtaggcaatgctgataatgtagtttctggggcacacagtggctgggagttttctggggaccttccaaatcctacctgcatctgagctttgtgaccctccctttggattcttgccaaaatagtccagcaactgctcttccttcccacacccagtaaagagcgtagggctggaggaacctgggcaacggaagacaaagggaattttctacagagagttttatatgctatttccatggctgtgctatagaaatgaaagagtatcattagggtttagagtctaatgaggcagcattagataggccaaggaaaagtcactctatgtaaaatataattatctggagaagaaaagtgagtgtacttggatttagaccacatgagagccaaaacctaattttgatgagaaactaaaattctggctatgcaaaaggcagactaggaagctagaaagcccgacttatgaataaaagacaaataggtctgttctggaacttggtgtccacttagtatccataacatggatggtttgtaaattcaggaataagggaaggtaagatcctgaagtgtactgtgcttgctaaaagaaactgttttcaggaatgaatcatttctcttacaacaggtaaatatggcctgctgaataataatagcccacattcattcagagcttattatgtgctaggcactttaaagtgctttataaatactagcttatttaatccttaaaacaattttatgagatatggactatgacatttgcgtgagaggtaaaagtttctattttataaaagaaaagacacaaagaaattaagtaatttgctcaagattacagataataactggcagaaaggaattcaaatctgggctccaaaagcccaggttcttaatagatctatctccatcaattataaaattaatacaatgatcagtatgcagaggcctaggcagaataagatattctgcattcatggtgcattttttaaaggtactactactactactttgtgtttagtatatacttcagattccagttcaggtttccagaactcaactgggacaaagttaaaagttttagttcaaaactgaagtttcctctgaagacgagtttcagaaatcagatcctggctccctgccttgcctacaattcatcttagacctcaggagataaacaccagcttgagcagtaacacagcaacaatacggacgacgatgagcataataaataatacttctaacgcttgaacccttgtgctaccaggaaaaaaaataaaacactcattgtgtcgaatggtagaaatatcacatctgtgcatatattcaccccagctccaatataattctaagactgccaagctctgagacctagaaatggtgagtcagtcaggaggggaggaagagaggggagtgcgaagataaaaatagagatgttgattgcattgttactaattcagtttagctccaacagcccagcgtggtgagtcaacagcagtgacaagacacaaagaagaaagaagcaccgtgctctgaggggctgagcggaggggatgcagacggtcacatcagtaacttcatgccaaaatgaaacccgcagcatcgaggctgtggtgtgagttcaaaaacaaacaagtgaaagtgccgagggataaaatgggctgaaatcgatgagcagcagtgcggccgaccctctggtaaaaagctgccttttgtaagaatcccctgattgtgggggatggggcctgcagatcgtgagcttagaggccaacttacaccattcgaacagagtattgttttctctggggtataaggcttactgtgattccagacgtgtcgccatggcagcggtgggggagggagagaggaaaggaggaacagacgggggtcaccaaggtcctaattctcatgcaagggcccccacggctcagccctgtctccctgagaagtccagtgttgtgctgcatcttctttcaagacaccactgatgtcaatccagttcaatttaatagatctcgagtgcctactaagtgtaggtctttcacttctaattaacattagcatctgttaaaatacctaacctctgcttggttctagaaaactaaaagggagaaaaagacctagattccacgctctcaacatttatcttgtcctattcccagactgtgtggctatacaggttaaagatacatagccacacggagggaatataatgaatggatgtatgtgaatgtgctagtcattcctaaatgctaactttatattacaattagaaagaatgagagtccttttgcattcttagagtctactgtgatggtcttcctccttctagtttgtcgcctgtgtacaacacaggctaggtgctaggcgacccttctgaaacatacctctgccatgatgtcactctgactaccttcaatggtgatccaacaccattagcttggaaatcaagatctgccatagctggttctgatcctatctaccagtcttcctcttctgttgttcaaatgcttctatgtacttagaagggtgtaataggtagagtgaatggatggatggatggatgaatcataaaacagacaaacaaacatcaaaaaactcacttccatctccatttgttggctcaggggtcaccatatctccccttcgagaataattttttttccgtggctttcatccatgcaaattctgccagggtctaggttatacctcaaaatccatatgatccaaatgaaacccatgacctccaccttctgtatgtcagtgactgggaccactgtcgtcaatctggtttcataagccagaaacctaggttccatccccatttccaaatattgccaaagccctttcactgtcacctcctccatatatatcacctccctctgtttacatgtcctatccctccattcagtgatttttcagatcagaggactgaagtcacctccaaatgaatctcttcacatctactcccctccatcagttttctatgccgggttagggggatgctttaaaatgatcctatcacactcctccttgaaactcttcagtgactttccacagctctcaggagagtgggcagaatcttaccaccaacgctgaagccatctgaccagtatgtcttccagctttgccccaccccactttcctctggctctctgcactggcctcctggcagctccacctgctcactgtgttcctcccagccttggggactcacttactgcttcttgtagttatgacttcttgtagctggaatgctctgcctcagcaccatccccagctcatctcatctgctggtatagtggttttcaaacttgagggtctatcacaattgcctggtgggtttgttaaaatgccacaatactgggcaccactcctgagaatttctgatactgtaggcctgaggtgggacctgatcatttacaattctaacaagtccccaggtgatgctgatcctgctagtcctagaaccacgcttggagaatcactgccccggctaccgtctattggttttccggatctctgagaaaccttccttgactggcacctccctcactaggctagcttagacatgctcatggctgtctacacatttccttcacagcacctgtcctcatcatgggctgtaattatgtatctgtgtgattatttcattaatgtctgtttttgtggttaaactcctgtgcctgtggttaggcagcatctctgttttctgtccccagtgtttactaagtactttgccacatagtgtgtgctcataaatatttgctaaagcaggactaatctcttccatgagattttttctaactaattgaggtcatatcacaattccttcctactcatgactattttacttaggagaagtccatcctcctaagagctgatacattttagaggttccccaggaataggaaaatcatcaaacactacagaataccaatgagagttggagaaaaattgtcattgtcagaacgaaggaagttgttacaaaagacactagtgcctgctatgaggcccacttccttgtgttgggatgatcaaatgggatattatatggaaagaacttagtgtaatacctagaatgaagcaaataccccaaaacattcactactattatggattacagtagcctttgcaacctgggtcttgtagtatcagttcaatttcaaatattctgtcccaaggtcatatttcttcatatattttgtctagaaaatctggttgtacatatggcctgtatcaaacattttaatattcatacagcatattatacttgactaaatgcggcaaacacttattaagtgcctattgtatgaactcatttggctggcatcagaggcgcacgcaaatgaataatgatccgataggggagagaaacaaacagccagcaaaaatgtaaggccgaataaaataagcatgaaatgaaggcaggtataaaacctacaggtatggaaaaggatggataatttctggctgaagtggtatttgattgggcctggagcggggagagtgatcttgacaagcaaagaaaagcagcagagcatttcaggccagtccaggaggagggagcttaatgggctgaggttctggctccctgaagtgtgtggctcactcaagagaaagagaaagaacagtgttcctgcagtgatgagagacatggtgagacagagaggaagctgaaaggtatttggaatcagattatatataatcttgaatataatgctaagaggctagtattttgttccataggtagcatggctccaattgtatcccctgcatgaagctgcttcgatatcttattttttttctcagatttggcttagggaagaagacaggtgtgatgtctacaatcatttgattggctagatttgcaaggctggccttcagctcacttttaacttcttcttgggtatttttttccaattggactatactgccacccgataagtggtcacacgtagttatcactattttctaaacgcccaagtgttctcagagatatgattatgaaaacaagattagcaaaaatagctaagtataaattggtagcttcttaacaaatgcttgactcagatttctctccaatctaatcctacccagatctgaagactttctttaactgaccatgagtgttgatattttacactttatgacaaaagtccttccaggacatacatggttctcatttatagctgttttcccatgtgttgaagaacacactaattttcttccgctctgattcccgtagtattaagatagtattttgatgacttgggctttctcattcaggcaatggtgctgtactcagcactccaataccctacctctctctccaatttccacctgtagtataaaaaagaaattgcctcccttatccatatgactgccactagacaggatggtggatatgagacatcttccatgttggctgtgcaaatctctaatgtgccatttctctgatcagataaaggtttgtcaattgaccaacctgtgtcaatatcatggtagtgaagcaactgtgacccgaatgtcatagatatctctgcttttctctgaaagagtctgcttttaaagaaatatgaaattacaaaaacatcaccttttatcagaatataacttctggttaaattcgttttaaggtcaagaagaaaaataaagagaaacatgaagtatttaatagtttcaaggctgatatttaactatcctatcactcatttcactggggacttaggctgatgaaagtgtttcttcaattgccaacattttctctaggttgtttcctaaaatctttaagaaagattagttatggaaactaatctttagtttacgggaatgaagacttattcttcatttagattcagacttagttgtaggaacaaatacttattcttcatttcactaaaccaaaaatccaacctcaagttatttacattctcacttgttgaaaatattgggatcgtatgtagttttatattctatctttttcacttattacagcgtggacatttccctatgttatcaaaaactcttctaaaatacttcaatagccatgaaatattctttcagttgaatataccataatgtacttaaccagttctctacttttggtcataaaggtctttttttttccaatttttcaccactatagataatgctagagtaaacatccttatacatatatttttgatcacatctctaattatgttcttaggaaaacatttctttaagtagaatcagtaggtcaaggagtaggaccacctttgaggagctctccacatactgctaaattgttctatatccatttttcatgtgttccatagtaatttctcaagtatctggtgacacagtttgaaatttgctatgagaaaaaccattgccaaattgatcggaagcagtaacttctattatctaagtaaatctattgttatcacaatgggatggattatttttctgtctgtatggagccgatcactaagtttccattcaaattaattagatgaactgtctgttacaaggttgtgaaacatatgtattaggccaggggtccccaatccccggatcatggactgctaccagtccgtggcctgttaggaaccaggtggcacagtaggaggtgagtggcgggagagtgagcattaccccctaagctccgcctcctgtcagatcagcagtggcattagattctcatagcagcacaaaccctactgtgaactgtacatgtgagggatctaggttgcatgctccttatgagaatctaatgcctaatgatctgaggtggaagagcttcatcctgaaaccatccccccggccgacccctggtctgtggaaaaattgtcgtctaggaaactggtccctggtgccaaaaaggttggggaccactgtattaggcagcaagctaacctaagtaagcaaggccctgctgtggggcacacctttctaccacactccacctgaagaacagaagaggctgagagcaggagaacaccagggaagctggcctaggcttcctggccactggccacttccaagttcaaaatctgactgtggcatggtagctgagtaactgataacaacaaaatgtgccaggccaatttttatcatttacataatgtggacaatagtgcccatattcaaaagatgtgtgagggttaagtgagataaaatgcttatcccagtactatactattcacaactatgtgaattgtaggcatccaagaactacttacttttttaaatgattatttccatgctcacaactgcctatggagttcagtatttggagagctgataaaaccagaagcaaaccatctatttgggaccagtttttaaattttgcacagctttcttagctctttctgttggtaaagcaattggaagtcaggataatcatcatcaccatcatcatcaccattactaccatcatgagcatcaggatcaacattatcaccatcatcacaatcaccatcatcatcaccatcatgatcatcaggatcaacatcatcaccatcaccattatcatcatcaggatcatcattatcattatcaccatcaccaccaccaccaccaccaccaccaccaccaccaccaccaccaccatcatcatcatcattgctatcattgtggcaaatatgggagtagaggccatggagacaatggctcagtgactgggctgctgctgggagctgtacctcctgttctgtgattaatgctgagtttctggggtaagttctgggtatcaggcctcctgaaatccgcactgtacccctctgggcaacaggtttggtagaggaagaatcaggcctcgtgcttttgagtcttaagagtccccttattggcgctagacataccagcagggcttttatgccagggtaagtgttctcatacttaagaacagcatctgctccatcagaattggagcttcctttgaatgcattccttcctttgagtgaccacaaacaaaaagaaagcagctgcagaggtacacacaaacatcaagatgttagcaggatggctgcctgcactgggcagaacaggctcacttcaggaatcagctccacatctcgaaccctaatcagggaggaagacaggaatcccaatttcagttccagttaatgaatgggagagaagaatcagaattctgttttctttttccaccaaattgatgacatcgtttttaccatgctacatgaagcacagccctgattctgaagagcagaagaaatagtttgcgtggtatctctccctaaagtgctccaaaaccaggcaggggcctgggggtatttatcttgatccttcctattcagctgaaattgtagaacacatgacaggaggaaaaaaacacatagctttaagatgaatgaaatagaccaaatatattggacattgtgtggctttgtctttggaatatcactgagtgttaaataactcatactgctggcttcttccttcttagaaaatcagtaaatgattcctcattatgcaagtcagtcagattttattattaccttaagattctatgaatacgaccactgtcaggaatagataagtttcacacagaaggttacgtgatggaccactgacaaaggcagaaagaaacccagaactccagctgagaaccctgaactgaattgggactgcagaggccagccctccacctcaaaggcaggacctacaaccatccttgcccaccctccaaccctgagctctttcataaagacacacatacagagtaccactggctgtggcagccagggctggagcaacaaaggccatgaactgtgactgctgcctgtgtcacttctcttgtgggtctgcagcttctgtgtgtctgcatgtgcgtgttggcattcctggtccttggtgtttgcatgtgggctctgctctgggcaggaggcagcagaacaagggtggaattaaattagacacatcagcagcgtctaagcctagtgccctggatcatcattccgccttccctcaccccgctctgctttttctttgttccatagcacttataactgtctaacatactatgtaatttacactcattcatgatgcttaatgtctgctagaacgtaagctgcacaagggcagagttcctattcttttttatccgctcacagatttaagtgcctagagcagtggctggcacacagcaggcactctataaatatttgtttaataaatgaatgtttatcagccattctaatttagattctagttaagcaattgataggtctgcaggccaagacctgttcacgtgtttgaaatatttaccctcaccccaacccttcaggctcaaagctgctcctggtctctacgaagcagctggctgtccacaaagcaatcactaccacttggtaaaattgaggaggaagtaaaatatatactgaagcagaaattctgggggttcagtagcctgggttgttttctcttaacatctgatgaccatcgacaccccacccccagcttggaatttatttcagaaggaaataagccagggtatggttctgatctatgattcgagaatattcaaggtttttgttatacctgcaagtcgcttatattgccactaactgcaatcagaaaagatcctaccttaaatgcctttctatcctcagaatgccgcacgcatttgttttcagtaaatgtttgagaatgatcttgaaagtgtgcaagagaacagagaataaaaatagaatcaaacccaagctgggcatctctcagcgtctcccagttgctgagaggtaataattagggtaactatataatttttcacccaagccaggacaactggcataaactgggactgtcttgggacgattatacagatggctctcttaggtataatcaacttccatcatattagaagatgggaaaggactagcaaagattagtgcctctgacatgttaaaagctctgtggtttgcattcaagggtcacagatgttgatcaaaatattcatattgccaatttgcactaatttcagtagtttgtaagtatcaagcaagactgttcaataaatgacctagcaaattaatctattttcccccattagtttctgactttttagcatgacaatatcagacaccctgttaaagaaaaggcccttcaagctgtgtaactgacgtgttcggattcctccttggagacgcatctgtctacttaccacccccgccccagcccatataccccctccatcccaaccaggcctctatttttcagttcttgcagtaccatcagaataagtaaaaaaggaccctgattttccagagggaccatgcagtctgaaaaggtacgtcttcaacatcattagcagttcatcttctaaaacctcagggcagcccctaggcagcccctcctgcagcaccccgcccccttccaccgccacccctctcttttggtgtcggcttatcaaattaatgaagcctatctagacgggaggaagttggggtagaagacagtggcttcagagcaattcaatgcaagcccttccctcttaaaaaaaagaataatgggaaaaaaattagaatttctttctcttagaataggaagaggaaagggaaacggtattgggggtggggtgaggggtggctgtgattgtctcctagttccctgaaggaggagatgtctatttactttctctggctgaacatttgcatgttaaaaaggcacagtgcctttgtgggcaggatttatcagggccacattttctacttgatagagcagagtgctggataaggactccaggtaaaggataaagcaacttcctacgaccttccctctcatctttttataagatagtcccgtctatcatgcagagaatctgggaggccagattccgtggccatgtgtgtttttgcagcacgttggtgggtggcaggaggcagagcctaccctcggccgcaggcagccatgagctgggtggtagcttcctcctgcaaggcacggagcacaggccagtgccattagagcctccccattcccctgtatccagagaggcaatttgcagcgcgaggtacaaaacacatcaacatctctcatcacgtcactgacctaaatatagacaatgacttcaaggaagagaagaaggaaaaaaaaaaaaaagttgcacgttcttttatacctgcaaatgctgccgagctcttcaaacaagcactggcaatgaggaacaatagataaccagtcagatgtgaagggagaagagaggaggcatgggtgttctgggatgattgctgtgataaggccattatagtttctcagtggaacatcaatcctcatttgtaacccggggtcgggatatcactttgggagcagtttcgtgtttcttgtcggcttttccatgggagccctgtgggaggaagggggtatctgtcgtggatcttctggctaagctgggctggcctcttcactggctaggatgggtctctgattcacagaagctttttccttcgcacgtgagaagattgtgctctcggtgtctttgttactgagcagcctcccctggcatccatttgagccatcctgaccccgggccccacctcagcatcccaggtcaatgtcccttctaccctggaaagcggacatgggctggctcgcttgtgtatgccacaaggagtatcagtgaagggtagttttccctcacagtgtgaattcagagttgggtcaagccttttaaagctgtgttcataagagtgcttaccttcttattaacttggggattattcacctgctgggtgaacagaagggccatattagaagcttttatgaacacgaatcgcataactagggaccttgggaaagacacctgaacaaaacatgggtagtatggatagactggtggcgtcagcaattaggacacaattgtggacaatcaattgctgaggaattgtcacatggctctcacatatttcgaatgctcttcctgttccctcagacaactatctgcatacgaacagcctgcgcagaggctccctgagtgtaacataattgcctgctagggaaccagcaagccacttcagatttaagctgtccagaactccatcatttaggctgagacacaaacccatgctcttttgtgttagcaaaacatccacaaatgtggtttgttgcttcagagaacacagactcgacccttgcagacacatacggcaccatcacacaaagatccctctccctttggaaaaagaatggaaaataatcaaaagaacgccactctcatacaagatagggaaactaaacgcgccactgcaaatgaaataaaataagaaacaatggaagaatcacaacaagagttgaggacaaaaagaaagtaagccagaagttctaggtaaaaatgagtaacgaccattcagaaaaggatctggctaaagcagggctgtgagtgcccaaggttaatacagagtctgatgtgcatgataggagcgtcttggtggcttccctggcacagtgacctctggcacttactgttcttctggaaagtgaggtgaaatcagaacatagaaaatagggaggtgtatgtattcagaaataaagacacccaaagagtgacagaaaaaacggcattggatttcaaataccagtttaagacgaccacaaccagaacaggaatctagctgctctatgatgtgtaataggaacagttctcagcaatgccattcaccaacaaagactgactgctgagggtttctgaaaaggagctgtggactgggttaaggtgaagatgctaaaagatcctgacacagtaacaggaatgtctttttagaacctgtgcttctattgcattccagcttctctatgcagattcctggaaacacagtctctgggataggtgaatgcaattaaaaattacaaaggactaggggggaaaaaacagaaaataatttggtcaagaagaaatatgcccagagtcaatttttttccaatccaatatctttgttaattaagcatttttccaacctatgatgagaatactaatagtaatctaatactatactactcattactaataaaacatatttatgaagtggaaatataatgtgcctatttccaaaatgtggttataaatgacttactctaagccacgatttaaaatggtttgagaaatgagtctttaataaagaattgatgaggatgatgactgctgataataattctatttggtaagatgatgtggtttgctatggcaatttgagctgaggtgattgcctcaaaaattactgcaagtaactactataaggaaatttaattggtgataaatacagtgatggtgtgtcaactcttgaaaaagtgaggctgtaactgaagaatccagcatcatttcgtcttctgattatattcatagtcattacggtgctgccaagatgttatttgtctgacacacttgcacatagtagggatttaaaaggtgagtgcataggcacctataattagtcctctatgtaggttcctacatacaattatagttaatcataaacccattaacatttagaaaaaaaacaattataacatggcttaggatggagctgtaatagcatttgtgatagtcagtgacatggatgctccacatggtcagaaagccttgatgttaggacaccaggatctagcctgagcttcttaaaaagcataaaacaaagcaaaacaaaaaaattcaagtcaaacatgtcaccaaagttcacttttctttttaatggtattactacactaataggacagggtgttcttgagcaaagcatttgatagaacttctttgtccatccctttagacagagagagctaagtgtcctagtggacctgtacagatatcacatacacattgaatcctactaaaagactaggcattgtctggatagtggaactccacggaataaacaaagccctgagcatcatggagttgaaagtctagagacgccaagcaaatgaacaaatagttaaatacaacataataaatgataaatgttgcaatgacagtgtggagtaggcacttcatggagacgaaggttgaaaatgggcaagagaaggctttgcagaagatgcacttcttttttttttttttttttttaaaaacatagttttattgtaatgaattacggtctttactcacaaaacaaaaatatacatggaacattgacttcaagggttggttaggaagtggaaatctggtggcctctcccattgtcatggtcctgacatagggctaagaataggtgattccacgcttgagcccaggaggtggaggttgtggtgagccaagattgtgccactgaactccagcctgggtgacagagtaagaccctgttgaaagaggaaggaaggaaggaaggaaggaaggaaggaaggaaggaaggaaggacggacggacggactaagggagggagggaggaaggaaagaaggaaggaaggaagcaaggaaggaaggaaggggaaaaggaaagaaaggaagaaagagaaaggaaggaaggagtaagggagggaggaaggaaagaaggaaggaagcacggaaggaagtgggaaaggaaagaaaggaaggagggaggaaggaaggatggaaggagaaaggaaggaaagaaggaaggaaggaaaaagaaaggaagaaagaaagaaaagaaaaaagaaaaggaaaggaaagaaaaggtgattcctgagttaaaccttaaaggactgaggactagtagaagtttttaagtcagatcaagtgtggccaaagcattccaagtagagaaataactggtgtgaagccatgaagagcctgtgtttgaggaactggcgtggtaaatcgcagcggatgttatgaggaaggggaaggagatgaagccaggaggcagatgaggaagctgaacataccaaggggtctggattccactgtgcagtgatgggcaactccacagtaattctgctcctatttgcattagtgacttgtatactggcagagtaagcaggaagaatgacaatgacaagaaaaatacaaatcttaccagttcaggaaagtattaatacccaaatagattcacaaatgctaactgctcttgtgctgtgctaggaaaatcttgtctgtatgtggtttatgttatgttatgtgaggtttataatggattcaagcacgtttaggcagcaaacaagttttgctaatttttattgaagtctgtattggtcaaatgacatttggaattttatacacagatctgggaatataactttttaaaaaaatatcagttattatcagcatgtcagaaagaggatagcctctgtgacaatgggtcagatggtcatgttaacgtaacgaataatggaaggaagtggccatgtctgagctgggaaagagaagctagagaaatatgaaagcttttgttagctctctagaggttgcctatgaaaaaggggtagatttactccatgtcacaacgtaggaacaaagtggaggttatatagagatagatttcagctgagtgcaaggaaggactttcaaatcactccatatccaaaaaatgaaactggatgacaggcaaggactccacggccatctcatcaaagagttttggaggagactcctgctcttggcaagaggttaagtggaggaccttgacagtcctttctccccaaagattctctaaaatgtcagtacatcctggctatatcagataactgcaatttcaaaataatcaatgatcctatacaatttatatctctggaaatctagttcatattaaaataatcaataaatacttttgcacgctgtgctattttttttttttttttttttttgagacggagtctcgctccgtcacccaggctggagtgcagtggtgcgatctcggctcactgcaagcgccgcctcccgggttcccgccattctcctgcctcagcctcccaagtagctgggactacaggtgcccgccaccacgccatgctaattttttatatttttagtagagacggggtttcactgtgttagccaggatgatgtcgatctcctgacctcgtgatccgcccgcctcggcctcccaaagtgctgggattacaggcgtgagccactgcgcctggcctacactgtgttaatttttaaggaggattaaaaaaaataagacacgatcctattatttctcctttcctcaagaaggcatgccaatgatcccatgaacaatcaccggcctcttacaaaattggggagtgatcccaatttggcattaattaggaagcagaaatcattcagacatagttatactagcaatggaggttataatgtactttgaggatacaaaggattcctttgagttatgaaacccaaacaaaaaaagcaatattgatagagtgcttagggcatattgggtactccacattctggcgataaggagatcagtaaaaaatgagacattttctctcccaaatttgtatcaatgacacaatcatggccaccaaaacccctcagagaatagaagaggtttcaactttctcataatcaagggacaatcaatgaggtcatggtgaggaggtttccaattacttgttgctaaaccagtatcagtatcaatttcatccaccagagatctatttccacctattatttatcataaaatcctcagggtaaaaattaacattagactgctgtttttaaacttttaatgatttttaaaaacccaaatgaagacccttggatcttttttgggaaaaataacacctaaaatcttaaaataaaaaaatctaaattaagaaaacatttgaagattcactgacaccaagtgccaaactcaaacccaagatcccagttagagactttaatattagactctcttattgcagttagttttcccatatgataaatacaacactgtctgtttattgataaaggcctagcaagatattctatccctgaccaagagggtgtggtcttgctgactctagtgatcaagctgagaaccagaagagtatttctcacctgacaaaggaaccaaatatatgcacacaccggagcttaaccttagacccgagcatgggatcgccttctcctatgagtacccaaagccaagatcctgggcgtgtggccaggagaaaaaaaatcaattaaaccgaacatgatatcctgaggaacaaaggccagcactattccagggagttgatccctctcactcttttttttttttttgagacggagtcttgctctgtcacccaggccagagtgcagtggtgcgatctcagctcactgcaacctccgcctcccaggttcaagcgattctcctgcctcagcctcccaagtagttgggattacaggcacccgccaccacgcccggctaatttttttgtatttttagtagagacggggtttcaccatgttagccaggatggtctcgatctcctgacttcgtgatccacccacctcagcctcccaaagtgctgggattacaggcgtgagccatcatgcccagccccttttttttttttttttttttttttttttgagacagagtctttctctgttactcaggctggagtgcggtggggccaccttggctccctacaacctccacctcccgggttcaagtgattctcatgcctcaacctgccaagtagctaagattacaggcgtgtgccactacgcccagctatttttttttttatttttatttttagtagacagggttttgcgatgttgcctaggctggtcttgaagtcctgacctcaggtgatccacctgcctcagcctcccaaagtgctggaattacaaacgtgagccaccgcacctggcccctcccatattttaataaggattgtttccctcaaatgtgcaggaagcttgagggaggagttgggtgtatttaccatccgtaccactcattcccctagggtgggaagagaagctataaaaagtgaagcaccgtccacctttattcactgtttcttcccaacttcgttcttcccctgcagatggaccttgtgttacccacactttcctctgggattgacccaacaacaggaattgtgcctggtgcctacttactaaatcctcagcctcaaaagtaaggatgtacaaaagtcattacttaaaaaaaatttttttaaggtatgaccttcatatttaaagtgaaatgtgcagaaaggcagaggtccatacgagcacataatctgtataaacaaatgaactcaatggttattaggcagtcagtttaagtatctgatatttgtccacatcatccgcagtgatcagcctggattcttcctcttaaattttaaataataaccttggaagaagggagacgcatctcctttatttctagttaagaaaaaacaacaggccagagagcataacagtaatttatgattttgctggtgtattatcatccactaataagtgcaacttgaaactaccaattatctcataagaggggtatcaccttttctgttgtgaatgactacatcgataaacggaggttcagctccctcactcttcgtcacgtcaccagcagcttcttagcagcagaagtgagccaaccagggaagcagaggaaaaacaaaaacagtcaacacacaaacacgcaagttagcccagcctctggcccgggaacccagagaggggctggggaagacagagaaagacagggggagggggccgcgtggaagcgcctagagcagtcggcaggtcacacacacgcggtgctcggcggcaaactcagtttacaaagagacatctgttccattactccaatgcattgtggctaattacatcctggcccgtctgtgaaatgacagccacttattctccagtgaaccgtaaaatctgtacatgttcgatttggggagtgggagagcagaggcgtggaggctagagtgggaggaagaaggggggcagccaaggggaaagagaaaagacaggagaaaaccgagaaacaacactttctggcaagatcatcacaaccctagtggaaggaatatgatgagaaatacagtgcttcgactctgagttcgaggccctaagtttaccatgcaagaatttattctcacagctgttgcttttccttgttattcaaaggctgcagtgccaaggggtggccgcttgaaggtctccatcatcattacgcaggggttgtggcttggggatagaccgacttgcccatttgcttcagtccccaggggctactgatgggatgggggtgggggctctccaccagctcttcagaagaatgaatcacagtatcccttctcacacgggaacctgaattagcagaaagcctctttaatagattgtgcttaggctgggggtggggcttcctgaagagtgggaagaaatttgggatctttaagaggaaaaaccagtgaaagaaggggaaaaatcaggttgggggcagggggatgctccccctgctttcagttgacattaaaactttatcctaacaaaaacccaaaatcacttatgtaactttgtgacaggcacaagggaaatagaaatggcaaatagagaacgctgccattttgaaatgagacttcaatccagcgtgggttttaataggaaacttatcttcattcctacacaaaagctttctgctagaggactcacacacttctgttggaatctatactagacacaactgatgatatagtggtgtgctactgtggttaaacattgatctttcttcctcttgcaacaatacaatactgtattctgtggatcacaactgtgggcctgaaagatctggcagctctctggagggaggggttacccagtagctttgcaccagccactaggcagtttagtggcggtagcacgtagactgggccacttctgtatgtggcctggggatccccgtggccggccagcgccctctgtaagacagcgcttcttgaaggtgcgttgcagtcactgggagctggcaaacgcagattccaattcagtaggtctgggctagggcctgagctttgcatttctaacaagttccaaagtgatgctgatgctgatggttccctggagaataccctccctcacacacacctgcccaatcctcattaggttgggctaatgtggggaaaggttggaatatagcacagttcctccaacatgaagcagtgcatttaattgctctaggaattttactaattttgagtcaaaataattttaacaactctgtatcaaccacggagatgtcataaaattgatcaaagggtgactacccctttctgggagaagggggagggagggttaagtctagttagagagagggtatgaaccgtgaaataggccctgattttatgtttactccaagaagttaattttgatcactgcaaagggaaaagtaatcttaaaagagttctggactttcattcatgttgtactaatatgtttcctgttggctgaggaaacaagcagctctggcaaaaatcccacttatagggagaggggaacaagacaagggggatctccccacttctgatgtgtgttcttgcatagtgttttggatttaactagaatgaactaaagtttaactaaagtaaatgttttcactaagagcaggggctgaagagaggtgaccccttcatcccagctcagggatggccctgtgtgtcagcagtgtgcataagcacgcttggttgcatgcatgtttatacttctgtcccaagttggtagtgaatgagttttagtttatgcctcagggcgcctgatattatgctacaaattctaagtgttcaatgaacactgctgactgactaaagacatgtgagctcagctttcatttattatttgaggcgtcccgaggctgattttgtttcagttcttgttatattccttccagactctgaacctatggctttctatgaaccagaaaacagactagtccataactgaggttaaaagtccattctggtgtgggtcctaatatacagatacccatgataatactatacagactggaaaaatagttttaaggctgaaaggagactagagatgatctaatttgacttctccaatttatcaacggggacctgccctatttttactcggtggcctatggtcattgaggctaaatgagtaactaggtagggtgaggtctttgacttgagagttttttctgttgcatcctgctgcatgtcccccaaagtttcatataacttttccaaagaaggccttaattttcttcatacaatgacagaagagtcaaatgttatcttcatgaaggaactgattgtggctcaaaggaagtcaatttaaacgcaaagatgatgggaaaaattccatctatataatggaaaagagaataacattataattcagggagctgagactcaggaatacattttgatgcttactcatgaaggtgcctggtgaggggtctggggactgcaccacagggggccaatgggactgtgcaggagacagcggatgacacagaaccttatcagggaagccagtaaaggtggtagatcatgtgacccttggccctctagggctgaaatgccagtaagaagatattgaacctcaccattctgtctcttcactttcacggcagtttctatagataaactacatcataaagtgaaccaaaataacagacacataaataaacaggtaaattcacacaggaccccaaaggtgttatagagaccagacacacatctacatttcagctcctcaatcaatttgtctgtttcacccgcctatcgtctgccagctcatcagtaaatgaaaaaagctagaaggggcaattgggagaaaagcatcaatgccataaaaatcacagacctctgcagtataggattactggggcaggaggtagggtggtgacaggaaataccctcagagggttgttatgagaactatttccaattcaaaacaacaatgatgatcctctttattcaattatcaacttctgctgtcttaatgccatgttttggggaggtcaaattaccaattaaaaatggcataccacagttccagcaagccagccccaggaggttagccaagtgctggagccctcctttgatagaatggcgaggggcctttctggcttcctggctcttgtgcccttctccagagatgtaggaatgctggagagcccgggcctatgttgttcttggtggaatacagcatcattcacacttactaagttgctactgctatttggctatttctcttagacagtatgagaaactttcagatctttaatttgctaaagaattactacctctggtcgggtgcagtggctgaagcctgtaatcccagcactttgggaggccaaggagggcagatcacctgaggttgggagtttgagaccagcctaaccaacatggagaaaccccatctctactaaaaatacaaaattagccgggcttggtggtgcatgcctgcaatcccagctactcaggaggctggggctgaagaatcacttgaacctgggaggtggatgttgctgtgagctgagatcatgccattgcactccagcctgggcaacaagaatgaaactctgtctcaaaaaaaaaaaaaaaaagaaaagaaaagaaaaaaaaagaattactaactccaatactaagcccaacaccatccctatcaaaatcacttttcctggccggcgtggtggctcacacctgtaatcccagcactttgggaggccgagacgggcggatcacgaggtcaggagatcgagaccatcctggctaacacggtgaaaccctgtctttactaaaaatacaaaaaaaattagctgggcctggtggtgggcgcctgtagtcccagctacttgggaggctgaggcaggagaatggcatgaacccgggaagtggaccttgcagtgagctgagatcatgccactgcactctagcctgggtgacacagcaagactccatctccaaaaccaaacaaacaaacacacaaacaaacaaaacaaaatcacttttaccgcaagagcacagttcagcaatcagataaggcaaagaaaggcactttctcctacatcacaggaatattttataatactattataaggataggccaggcactgtggctcatgcccgtaatcccagcactgtgggaggccgaggcaggcggatcacctgaggtcaggagttcaagagcagactggccaacatggtgaagccctgtctctactaaaaatacaaaaattagctgggcatggtggcgcatgcctgtaatcccagttacttgggaggctgaggtaggagaattgcttgaacctgggagttggagtttgcagtgagccgagatcacgccactgcactccagcctgtgctacagagtgagactcggtctcaaaaaaagaaaagaaaaaaatatatacatatatatttatatggataatgaaaatctttttggctgggtaaataagagtcattctgtactgtctgcttagatggaaaggcttgagcataagctggctgggagatctattcatgttagatgaggctcccagcgagagcatgggtacatcggccaagcctgggttgggacatgttttcccagatcaccattataggatgacacaaggtagctggaggccaccttgtatgtgctgttctaacaaggctccctctgttaataaaggagattttcatttggtcccaaggctactcttaattgtgatattagcatgtaagtggatctacagttaattttcgaccaggcactagatttttagctttattttggggtttatttccttgaaaatactgcatttcggcagtattgccctatcttacagatgattccctacccttgagatattccctctgtctcatatcatttggagtctaattttggggaggagcgtatccattagatattgctcaattcatctttttcttcacccctgagcctccctgctttgtttagtttgaggaaagcaagccattttttcttagaaaaaggaatcttaagcttagtaaaatgcatttctgagaacaagagattctgaaagtgttgctgttcaggtccctgaatcaaaaatttttattcctggttcttctaagatgctttttccattctttctctggtaaattggttgcactgtccaagttttccataggaaaaatggtgttctgctatgtttgggacaagatactgttctgcatgttctatttcctttcatcctagaatagaaaaacttttattattattattgttactataaaacacgcactgccactttcaaagcatccccacagaatcaagatgtggtgtcctcctcccttcccttgatttgtaatggtgaggttaacaatggtgttgtggtttgcttggccccttgacatagtgtcagcaacatagttctaaacagatttctgagatcttctcttctgacccttggctgaagtcacttgaaaacatttaccctaaaaaattcaggtgggctaagtgccaagccttagccaaatcctcagtcaagcttaaatgtcttaagagagctgactgcttgaagccaggtggcttgcacatctgcaagtctgattcatggacaccacttgccatcaagaacgcgctggcatcattcctcatcagagcagcctgtgagccccacacacgcccctccccactcatcacaaggaacaaggtctaggtgaaagattcagacagcagcaccggatcctctgttggcatcaaaagtccattgctgtccaccatgacataaatcagatcctccgggagcaagggggttgaggggcaaaagtactcttgaaacaccactaccagaatggggggctaaggatcaattgcttttgccatgttacccacaccttctcaaatacaaatcatcgtgaactagctcatcttctgctatacagcaccccatccaagtccaacagattttttttttttttttaatggagggttctttcgttggcattccttttcatccttccccaagaggaatcaacttagggagcagatatgcagcgtgtgtgtacacccagcatgtgttttcttgttcccaccctacattgtttgttgaaataaatatggaaataaggctgagcaagacagccaagccagccaaactgaaataaattcatcactcatgggctctcaagggatggaaaccgtgcatttttttctaaatgattatttctgaagcactgaaggaatggctatatcactaatgaggcctgtacgccatgactgctgattataaatgacctgcagagagacaaggagatagtggatatgaaggggagatggtggcatggaggcgaggggaagcagctgctgtggaggctgcagctgctggtggccagcagtggggattactatccaaaagcaactctccctgcttttctgacccagcagtaagccctcagaagagcatataattattctgtgtgaattcaagtgagtggaaaggggtcaaaagccccccaaagatagaaaaacgtcttctgtataagtctgtatatcaccatgaccatctctgtcttcctgtgcatggaaattcttggcagcatcccaggatctggaaaagacctggatggagactgcaatgacatataaaccacactaagacactacatggtcccctggcttctggcccctgggatcctcccttcatagctacgtactgggcatacagaaaaagaaagtgcagatataagcagcacagttcataagtgggatgagagctctccacagagcagttggtaaattccaggccaggtggacaacactggacttgcaaactaggtatcctaatgcttggactgatcaagccatgactgatcttaacaaaacttctcagagcttcgtgattcggtggtactcttacttcacatgatgggctttagggaaatgccaaatacctcctggcatgacccagcaagaatcacccagacagaagccccggtgcagtgtgagcagcggctagatgaaaaggcctggcaaggggtattctcgacaaatgaagggatccagttcccaagggcaagggcaggataatgcggtagttgcttttcaaaatgagtgtatcattgaacttgagaaaatgcactaattatccttacatccttatgaacaggtggaggtggggaggagcttttgcagcctgttgaactaagaagctgtgacagggcgtgagatatgtcagcaatgctggtggtgccagaggtttctgaaggtaaggaggatgttgctctctctgccatggtggccagcgagccctcacacaacattatgaaaggtctccagaaccttctcaattgccgtgtgcattgtcctgcacatagtttcatggacatagagtcacatgtggcaaaagtgaaggcctgggctctggctcttaatgcaacaagcactctggctgctctaggttatcagcaactcatctggtcacagtgattgcaaaatgaaccaaggattctgggtgatcatcctccatatcctaaatgactaaagggataacaacatagaaccaaaagatatgtggcttccagcattataagggaagtatggtcaccaaatttatcaaggcaatactcatacatagggaggcaaaaggagaaagacataaaggactaattataaaggtttacttagcttacttccacattttagccttgctgctgtgcaagaaaaacacatgcatttaactccctctctgcagaccttttgggcaacgaagagccacacatcagcaaaaagaaaagcaacaaacagcaggccccaacattcccattcttcatcactggggtgaatgctatgtccagctctttctctctcatcttcttcatgtagggtcaaggaacaaacaggggttctcaaataatcaaacgaagaaaagatttaaaaatcacccatttcaagatgcaagcgccttgccttgctgcttccaacaggagagcagagagaatcccaccagatgctgcttcactatcggcgctgacgctttctaatgaatctgacccctggctgcagctctaaaagggtgcagcagtgtgtcaatgtaaacagctaaacctagtgtcacgtcaagtggtaacaaggccactgctggttttttacaagcgctgtgcacttagcagataaaaatgagcatcctatcgctggtccccacaagtcacacttatcaacagtgagaagaaacaatgctttgtctgataggtgttgcttggtgccagtgacaggaagttacatttcttacaggctgcccattagcataatgaaaaggcaagtaacagctgcattaacaaaatctttttacatgtgtccacggtgagcagcgcagagcttcctgatgttccctctaataaagagaactaattaccctccacagtgccacctgggctagagacaaccgatgtcaggaaagggctttgacaaacacatttatttgtccaggaccaagtccagggccagcaacccccattcttcctggtatcagagtggagccagatgcacacaggatcaataaaaggtccagagttcactgcaggctgggggcagtacctgcagacaaggcatcccctgggaagactagggcttccagcctctgcaggggtgatgctttcagagcccacacggagtacagatcaacctgggcactgtgacctgatattgggttgaagttcccatctgaaacaagctgagaggtttgaggatgccaaacaaggagtttaaaagggaaggttgttttattcatgcgaacatacctgctttttaataaaacaatgttaagcagataactatttgttgacattattatcccctgattttacatacaaggaaactaattatggaatgggtaagtgactgtatcacatatctaaaaacagaaagagaagagaactcacgtttactgcattcatgagcatctactcattatctagtttaattcttcccacaatcctagaaaggaggcatttttatttttatttttatttgttttgagacaggatcttgctctgccacccaggctggagtgcagtggtgcaatcttggctcactgcaacctccgcctcctggttcaagtgattctcatgcctcagcctcccaagtagctgggattataggtgtgtgccaccacgcccagctaatttttgtgtttttagtagagatgaggtttcaccgtgttggtcaggctcgaactcctggcctcaagttatccgcttgccttttttttttttttttttttttttttttttttttgagacagagtctcactctgttgcccaggctggagtgcagtggcgccatctcggctcactgtaacctccgcctcctggttcaagtgattctcttgcctcagcctcccgagtagctggaattataggtgtgtgccaccatgcctggctaagttttgtatttctagtaaagtcggggggttttcaccatgatggccaggctggtcttgaacccctgacttcaggtgatccgcctaccacagcctcccaaagtgctgggattacagtccccagtcaccacgtccagccaaggccagttccttttgttagctgcagacgctttctccaacttcttttccctctaaagagaaggtaagactaaactgataacttatggcatctgttcctcccaaaagctctacgtgtacccacctgataatggggctttggcaattaccttactgcttccaacccaagtcctcaatctactatggagctcagcatgcgaagaaaggtgacgccatctatcttttgcccaaagctgagtacatactaagatgtgtctactctcgggtccatgtgctcaaatttagaaaacacaccagaaaataacttgatatatcacaattttagatttactacctagtcccaatacagggaattagaatatttccaaaatcctgaactcaaatcccaacttacactactgacaggtcttaattacccatgtttaaggacaaggcaaaagtaaaacccaaaacctgatgaattaacattcataataagttaatctagcccatattttcccttcttagttcaccaactgttttgctagaaaatttataggattacctgttcatagatgtaggtaattatatacagttggggtttctctagaaatgactcctgaagtatcttaattcggagtcttctaatgaaattgctactatctccagtttaataaccaaattattactgtcctgcttggtctgatcacgtcctagtctggacctcagcttctgtttcaaaaaatgagcatttcttcacttcctgagacctcactgtttgggtctgatgaagcaacttcccatggacggcattgtagccatcgagagaaaccccactcaccaaaggagaaagcttggcccacagggcccctgggaggtgccattttcatcttctattgcactgcgctgacatttttaaattataatgactccatatcccaaatgagtcctaagaacattctgaatcagctaattaataaatcaattgctcttcaggatggcatttatcaaattcacaactaatatgtgaggtgcgggtagagtggaagtctgcagctgctacacctctggctctggtaggacccagcttgttccaaaacctctgttgcactctggctgtaagcgaaacaccttcaagtttctatgcatactatttgagtccattgggatacaatttcatcatcagagacaacatcttatgcaataatgagtagttgcctaaagaatgaagaacaggagcatccctactaatcagacactcagtgtcccatatggtgatggtaattgaaacatccttctggtcacactgttgaactaagattgaaatcaattagatgccactgtttagatgttggtggcattgtgctgtctttttcttggcacagagatgatgtgggagttaacaataccaagcaaggcatcctacttcaccaagagtggaccactggtgaactctcaatcccttaaaacctgataatttctacaggcttcagaatcactgccaacatcctgaaaatcagttgtgacaataaggctgtcagagcagtgtgtactgctcttaatcatctacttagtgtctctttcttggtcatagactgtaccttccttaccactgcagccacatggctcctcttcacatgctgttgttgacagtgtgggtgggatatagggatggtgggcagctgcccaaattttctgttcatcaatagtgggatgacataaaatgagaccagaagacaagactgcagagagcctggggacaggttgagtaagaagcagagagctgctgtccagatgccagagagctgaacaaaagcctgccatttgtttagtcctattctggctcacactattcaccttcctttccttttgatatcatcaatatggtttttctcctggaagagactttctatttctctttctctctctctgtctgtctctctctctgtctctctctctctctctccctctgccccaacacagcatcccttttgatgagataatgggtgttgacttgcagtccaatacttactaaagcctgatggctctacaaattacttagacagaatctaatcctgagggtaggtatcaatgatagggtatgtgtgtggggaatcagaaatggcatgttgtcctacagagaggtcacaccaaagaagtaagaagatgggaaagaagaagtgagggtggtgacagagagggggaactagacatgtggctgcattagacagagtacacagaagggaggctcaatgtggacatgggaaaaggtatattcattaagaatgaaaatagaagagggcttctttattcaagttctgggtgtctgaatcaggtcaaactggcagagacacataggtagaaattgaagttagaaaaattaaataagtgcaaggaaatcatattttgctgtgtaagttcatttctaaacatacagatgtcagagagttttgataaatgctcatattcttttcatgattgtactaagatctcacacggtaaatgacatcaggagttagaatggattgagatcaagacaaagcaggaacctactttgaataaaattttactcatctcagtatttttggatgtttcctttatctgaactaaagcacttcatatgatgtcatctcttattttctcttttgtagtctcctttataaatctatggtgaatggtatagaatagtttcattggtaccacaatccccttatacctgatattatgataattctgaaatacaaactgaataaatacataggtcattttcaaaatgatttttatttgctcaacagattgaatctgtgcagtagtaaaattacagttcgttaagtaaatcttgagtcagagtaaggtttagcagggtaatgttgatctttaaccccttcatctagaatatatttttaggagtgggaggaaatcccaacatctatataaacagagaactcagagtttgaaatgctccaagcagacatagttatttgtgacagcttgacagtgacaaaaaatccaggagctgaaatgctttctcctcggcttatgagtggctttttatgcaaatcttgatagatcattttatgccttaattttcctacctacagattgccagaagccttggtgactaaactatggcttataagaagctagcactgtactttatttttattttactagacagactctatcaccaaactacatatttttgtctgtaagaggaagagtttaagaaagaaacaacctactaataatagtttaaatattattttatatttaaagatgtattttattttatttattttaatttgtgagacagggtctcactctgtcacccaggctggagtgcagtggcacaatcatagcttactgcagcctcaacctccctggactcaggtgatcctcctacctcagcctcccaagtagctgggactataggcgtgcaccaccacaccaggataagttttgtattttttgcagagacggggttctgccatattgcccagattggtctcgaactcctgggctcaagcaatccacccaccctggcctcccaaagtgcagggattacagacgtgagccaccatgcccagactaaagatgtattttaaaatagccattagtttatatgacttttggtagcagacagagcttttctttacaggcacagtctttaaaatacagctccattaaaacatttttgcttctggccttctccagtatacttcaaatacctattgcatggctttattaggatatcctttaatttagaaaatcaaggtgattcattgtaatcttttggaggaaaattgtgtgttttccccagtgaggccatgtcacaattctttgatagcacaaaggtggggaaaaccccaaaagtgtaatgagactggagggatctgcttcttcccacatcattcagtaagattttcacagttcacacttaggattttccgaatctatgagaagacaggccagagacagggtaatgggactgagtgctgactgatttgcaaatggtacaaatttcaccacttgacaaatctccctccctccattctttcctcttttcctttcttcttcctttctcagctttcttccccctccctctttcctccattattcacattgtgtatctatattgtgtaaaaaacaaaacaaaacaaacaaacaaaaatatatatatggttcttttcttctgggttagcctagaccccagtttgtccagaatagtgtgggaagttgggtgcagagggcagcatggagagtacaagatcactcagattcaatccgttgagcaaatcataaaaatattgttcaaggagtcctgcaagagtcacacggaatcccgcagtgcttgttttacacatgtttccatgcacacctgatactgtgtctctccctcaaacacttgggaccgctcagttcatagggaggtatcagataaactggaacactgttttctgggcttccgtacaaagccttttaaatatgatttagagaattgggaactgattaagaaacaaagtgccattgctagcactaggaagctgattgccctggtgaacaggatcaattaagtacaggaggtaaaatcttcaaaaatactttctagctatgccctgttgctgatcaccaaattcatggtaatggaagaaaacatgcttcacttgattattgtgacaactgaatacactgctgcttctattgttgtgaaaagcttgcttgaaaaggaaagttaatctggagggatggatgactgagtggcaagcctaggtcacaaagcacagctctcttcaccagaaatctacatgggactcaggaagaaacagaattcaggctattttgtttgtttatttgtttatttggtggtatgtttgatctggacaggagactattttagggatctccaatctcatccatttgatctatttttcttttaagcatgtgtgcttaggaaattacatattgtaagcgaccctggggtgtgcaatcttatctcttttaatacacttttccattctgacaaggagcttcagtggcttggaataatcctcttcaattgacaaaagaagcccccaatttctaagtttttaaaccattagtggctgatcagttgcaacaaatatgctgccactgctgctgctgcacctaatgattgaattttaaatattcatgatggatggatgtctgtgtgtgtgcacagaaatgacagcatcgacggctgcttctcaccagggcaccgttaaagctgaggcagaagctgcatatgtcagatattttctggttacatattccagtcattaacaaaattattctcatatagatccagaagcattaatgcgtgagatatatgcatctacaaacacaacaatgttgaaatgagcagagtccttccctcaaaaatagccctttaatgattgaacaaaaaacaacattgaacacaccagcaattctgacagtggctatttttgggcactgtgaattttggtgattttaattttcttatttttgccaatctgtacaaattatttttctaagaagacaaaagttcatgaaaaatcccaagctaagcaaaataatatcataataaaatgttgaccattaaaaaattcttgagagatatgcacttacgtcttatataaataaacacaaaagaagagaatagagtaagttttgtctaagttttagctatgaaataggtgggaagtaagattgttttccctctaagactagagaaaaggcaagtcaatttctagaggaaattcaatacacaggatatagtgatcagaaaagggacatgctttacgctatgaaattacaccaaatgtattctttggccatgattttgggctcagattataaacaattaacacagattagctgaattgaaaaatgcccccattttcagcctgctagaatgagcccctacatctttttgtttctttcccttcttgctcagcaatctctatgtccccttttcactgctctccttttctggcaatgttcttcctgacatatatatttaaacactattagatcttactgtttcttgcactgtgcattaacatcatcttttttcaaatggattcctatttaatagtatatatgactatcctgatcatagaaaaggggaaaaataatgaacaaacataggtattatagagagcaaaaccagacatacttgaattgctgtgtaggtgtgaatgcaaagttaggtttgtgattctatattaggattctaggggttctctggaccagagactaagtggttaaaaggaaaactgtatgaactgcttggctatgattggtccctaggaacttcctgtagaaaaggattagagcaaataactgaaaggagggtccagacgctgtgtctacaagaaacacggggcagagacaaataagacaagatctgacctcaaagctgataaacaggttaaactgtgcttctggggttggcgctccccagttaagaggttatatcatgagtttgttcacaggaaggaggaatagcaggaatgggtgatgatgaaggtaaaaggagcctcagtaggaaagaagaattttaaatgttgagtctgaaaattacttgcactgtaacaatattgcacgtgatggcaacagaaccctgaagtacacaacagttaatccaatgagatccactgtaacttaaccactcagattttaatttgtcatgtttgctctatcctatcaaaatatccttttatggttcatttgtggatcagcatgcttccttgtaatgttacataaaattctgaaaggagatttttctgtaactgttaacattttaaataatatttggtacatttataggagttacagagaaaatgatcttatgaagaaacatggcttgatatgctaactataaacaaatatactcatggacctttatactatataaaaaatgtgtttcatgtcttacatgagatttacagacaaatagcactggtattgtcaaccaacttttcagtttgcttaaaattcttacttgcctgacactaaattttattcaattcagtatatttccccccctacaccctatgtatttgtagccagttgtcttgtacctgatatcacaattaaaaaaagaaaagcaagcagtgttttataaaatctaagtttctatatcattttgtgtaaaatagatgtaaacatttaaataaagcaaaacaacatcctaaaggatagtttcaagtcactattactgtctcagcactcctcgttcatccagttaatctcactctgcatgactaaggtgaccatacatcctgatctgccaggaccttcctggcttacagaagttgtcctggtgacctctttggttagtgccccttttcactctcaaaagtgccctggtttggataataaattagatggttttgtccaaggctattagcccatgagataagctaggttgttatcaacacctagcactggtataaacctcaaccttatatattcttctttttttttttgagacagggtctcactgtggtgcctatgctggagtgcagtggcacaatctcggctcactgcaacctctgctttccggacttaaacgaccctcgatcctcccacctcagcctcccgagtagctgggaccacaggtgcataccacgaagcccggctaatttttttgtgtttgtggtaaagacgggcgtttcaccatgttactgaggctggtctcaaactcctgagctcaagtgatttacacacctcagcctcccaatgtatattttctttgcttccaaaatgattgttgagagtaaagcttttgatgtacacatatacttatgttaagacagaaagaggattatttgcaagattaaaaaaaaaaaaagagagagagagccctctaccaaaatgtaagatatggttgacattagaaaattacccatattttaagagcctctttccagaaaagtgggaaattatggtaattttacatgaactatctttggagttttagcattcactactctggcaacttgggttctagaactttaagtatgctctcctttcaaatactgtccctccaggctctctgaaggtaccaatggttttataatcttacagccttctttctggggctcttagaactgaccagaactaggaactgaaggccagccttttcttaaatatacagcatgacagtatgaccatccaacttcttaaaggtgttgtttatctatggtctaggtcagctaccggtttgccctgcatgtttgacatcacagatataacacgccacctggactacttccttcttcagggccttttaagactcttcagaggaaggccagctcctattggctctgcaaatccactttacagtgccagtgcccaaggctgtaagccctggagcttggagagaaatttggaagaaaagcaagagaaacagcaaccaaattgtcttagaatgtagaatgtctttgggttgttttctcttttcaaacaatgacaaccaacatacagttcattatttccgttttctaaacagaggaccatgttcctacttggcgatatggggctaacataaagaataaaagtaagataggctggttgggggcattggctcaggcctttaagtggaaaatggattttgtgtacatggctttaggactacccttgagattacaaaggaaataggaaaacatggctatgcttgcagactgtaatcatcttggcgcataggtatatgtgctcatattaaaataatggccacttgtgaatgactgattgttggaggagtgtgaagggatgttcctgccagaaactgaccttagagatctcttgagtgaatagctgagggattgctgataggaaacagagaagtgaaagccgctcttctaagtttgtacgtggtctctctccaaaacaaaccaacgggttctaagaccctgagtaccttaggacttgctgctaattgaaatttgagcaggactggcaccttagcaatcttcactctggctctatgtcacaggctagagtaaacatacagaataatacagatgtatagatttacaaatttggaagtacaaactttggaattattgaacacttgttctcaattgctaaagatcctttaatcaagcatatcctcgccagggtactgaacaaagctggatgaaaactttgcagggcatagcaattttgggggtaagtttcttggttctttataacctttctgcaaatcaacttatgaccatgtcatggtcacagagtaaaatgtaaaagacatagaaagcaccataggtccaaagaagtgtgaaacctattgtcggtaactttctgtatttccaaagctcaccaaaattcagaagactgtttttttttttttttttttttttttttgagacagagtctcactctgtcacccaggctagagtgcagtggtgagatcttggctcactgcaacctctgcttcccgggttcaagcgattcttctgactcagcctccagaggagctgggattacaggcacctgccatcatgtctggctaatttttttcgtagttttgtagagacagggtttcaccatgttggccaggctgatctcgaactcctggcatcaagtgatccgcccacctcagcctcccaaagtgctgggattacaggtgtgcaccaccgtgcctggcctggactgtgtgtttttaattgcatggtactttctatgtttctagactgttagtaatccattccaggaacgtcacatttgccaaaatgcagcattctggttatgtctctgcctttctcactgactcagccattgtgaaatggaaagaacaccttaggtttgtctccttgctttgtttccctttaccagttgggcaatcttgggcaagtcttgtactctctatgatgggcctcagttctcttatttattttctaattgaaaagaagtaatgtatgtgaaagtgatttataaataggaacacacagtacacactttactactaccctcttgtgttacagacaagacctgacattacagaatgactaggtgaccagaaccagaaagtgattcagttacagaaccacagtcagccctagtatccacacattccagggaactctacacttctcatttctgcttcccttatacatacagactaaggacaggcttctaatctgtattcaaagttcatccatttcaaatggtaccatttaaaaagttgctcctttcctcaagataatagtatccgtttcccttttgaaaatggtaaaaatcaaactaaactaaccctgctggggatgcttgtatatatgttccaggtagggaataaataatccttgtattcttgaataaacaaagagacagtagggcaggtggggggcctgcaggtgtatttgctgagtttggttgggggagggaagcaggaaggaggctttgaggattatggagatggagatggcctggaggtacctaggggacattctttagaggctgggtgataagaacacaaaagcctcttcaggaggaggcaaatgatctctgatcaaccccaagctttatctcccagagaagctgaagagaacagccaagctgataataacacctcagtgttattagcacttgctgaggactttaggcactgcagtcagaaaatcagagatgttaatgggggaagaaacttcattaccttccaaggttgggggagtgggagtggagaggggtgtttaaataccagctctgctttttaccagctatgagcagctatgagaccttggataaattttttattttatttttattttttttttgagatggggtctcgctctgtctcctaggctggactgctgtggcacgatctcgggtcactgcaacctctgcctcctgggttcaagcgattctcttgcctcagcctcctgagtagctgggattacaggcatgcgccatcatgcccagctaatttttttgtaattttgtagagacggggtttcaccatgttggccaggctggtctcgaactcctggtctcaggtgatccgcccgcctcgtcctctcaaagtgctgggattacaggcatgagccaccgtgcccggccacatttttttttatcctttctatgcctcagtttcttcacctgaaaaactgaggaatatagcctcacaggtcatttgagaattaagtctgatgtctacaaagctttcagttcagtgcctggcatgtagaagtgttcaagaaatgtcagttgttttattacctatacagcttcctcagttctcagtgagaaaatggagggccagagaggtgtagtgacttgcttaaatccacaaggttcaaattaatggcaaaatatgggctataaacctaatcttgtggccactattacagtcaatttccccccacattctatgctaattgtgatatctagtgtgcccagggacaggcatatattgaggggactggatgtgctctcagggcccttctaggtctaccatatcagtgatgttaagtgacagtatcatccataaaaccatctttcagtgctcttttttaatggtgaggaacattttcttggatagtctcaagctgcagatgtcccactcaatgctggtttaggcctggtggcaacagggagagcacgaccacagtccccagtccaggagacctctgtcctaagggcagtctcactccgtgcccaagatcacttacagggctgagtgctagtgcaggaggaaggcctgctctttgttgcagaacacggtggtggggactcaggtcatctggtggtctctccagcagcatggtatagctgtgagactccactgcaaggatatcctgctgtgctgatggccccagcctggttgtggaatctgagccttagactcctcaggttcattgggaccattctcaactccccgccacagcctccttctatttcctaaatcagccatgtgctctcacccaggagaaagggaaatgaagtttgtttaatcactaatgtagatccactttcaattctaaatcaatggatttgagcctgggggtggctctgcatcttcggctccatctcttaccactagaattgagcatgttcagacgtctgcagtttctaggagattcatcagaggatgaatggggtatagctggagcaggtgttacatgttaagcaattctgtcctcactctatttgaatatgaacttcatcctatgctacgtgctggtgtataataaatctcagggtctgacacatttggaggtctgagggaatgaagctgcagtaagatgaaaagcatttcatgcaaagagatgaaacaacgtcagaataaaaagtttatcaatgtatatattagagaaaagaaatttgtccaagtgaaatggcttcagggatgttttacagttaaggtattttagaaagacctttctctatttttcctctgtttttcaacacatgtattagatttatcatcctagtggcatatctacatgcattgcatagtgttctttgcttcatatttccaaagcatttcagtttttcaggtttaaaaatcaccggagaatttataaggagtgaaaaatattctgaaaaggatgtttgattgttgtaaaacctcacatttgtattgcttcctttaccttatgaagtgcttttatatacattatctcatctttatcatgggcatcaaaggtttgctatcatttggagagcatgtgcctggtccaggcctgtggagactacattacaaaccccttctttttaagttctaattttcatatggcagcaaaaaattttatgagtccacaggaaaacagaataaagttattatgaggaaaccactctatgcttcctaataaaaattccgtataaaaattgttctattccaaatgtaggctcgggaaaactcccagtcactctttaacactgtttggatcccactccttctgctatacacggactcagtcccctttgtctggaccatccctcaggactccagatggacctgtgtttaccaggactctagctcattccacactgcagtgcaactgtctgtctatctccacaagagactaaaagctcctggagagccatgccaatgtcttgtctttatctcccctgttcctacccagcacaatgcaaggcacttggtagctgtccagtatatgtggaataaatggagagaaaggcccactggaaatgaggatcttatgcaaagtgtatagcataaatgggtgcctgttagtgcagtcaaaaaatattcttaagcaataagatgaatttaacttgtcatttacgaagtcgaattcaaatggagacagaggagagaactcaggagagggatcctcctgttggaaaaaggagaactacaaggacctgcaatgtagagacctggacggacacaagcagcgactgactttaactctctcctctagcataaagcagttttctggatggagatattgggaaagcagaatgagcaggtagcactcagagagtcaactgtcagtgatcacaaagcaaatggttgtcttcatcctgatacgttgtactcaggtagttaaaggttgaagtaaagtctcttgtcgaacttctgtgaagttgtaaagtgctggagtcagagctgaagccacacataagccctgaaaagcttgtacctttaagaaaatcggcaatctttcacctctaaactttgtgattctgtgaagagtacaggagaattatggtgtcccattctatgcaccaaaagaaagtacatcaacaagtataatctttgttattattgaataatttgtaactcttaggagactacaactaataacccatatctgtatgctattttctaacattaacagatgcttaaggcaacaataaatctaaatacacaaaggggaaagcaaaactgtctatgtggttctgaattttaattgtaggagtaaaaaaatgaaggaaatccaagaaagaaaaagtcacgaaaacaaaacataaaagaagataattaattagcataggcataatgaagtttttgtaattttaaacaataaattccacccaaagcaaataggaaatacaaatatcagcgacattaaacaccaacaagaaagaggagtggggagccagcttaacctctgcaactggtttactgctggctgaggcaggaagaggtttaaaagagattaagaaagataaacagtaagctgtctgttgagccactctttatttggctgtgtgcacccagccaagcggaaggtctgtttttgagctagagggctcaaatacatccgacaaagccaagagacagaggatgagagggcgcttgctccagaacatgatagaggtcccccaccccacccccttcaaacctgaaaggaaagttgccactgccagattctgatctagtgactttggattttcttcattggtgtataataaaccaacatattgataataagttttcttacctattgtttggctaaaatagctctgttgattctcagaatcacagaatttcagaggttagacatttaaggtacccaagtctccccatcaattaatcaagtagctatttggcctatgaccacctccagtgacaaggacttcatttcctcctgaggaggttgttaccatccttgagcagctctgaatattagcaaagtctcctttagattgagccaaaatttgtctttctgaaatatccacctttggcccctagatagaaaataaatctaagccatctacaatatgagaacctttcaaataatagaaaatgctattatgtactactggagtcttccctacttcgggcaaaacagacccagttcttttaaccttccatcatatgattttaagttttctcaccattgtagctactttcctctgaaaatccaatttctttctctctctcaagtgtggcattcaatggacatatgccacctagcgtggtctgacgagtgcagtcacagtggaccaccccaccttaatctgggttaccatataattccatcaggcaactgcagactggaaagagtactcgcttcatttactgagtatctacaatgtgacaggcgagacaagcactttaatgtgctgatttcaaactgatttcaaaaccttatgtgtaagtgctaccattattcctattttgcacccaagggcacaaagacacagagaggttaagtaacttgtctaaagtcacacagtaattggtgtgctttacactgattcattatgcacctacttttgatttgatagattttgaaactgtgaagatctttttagatctccattcctttcttcaatgtactgtattcattattcctctcagccctaggtcatgtccaatttgataaacatgccctttataattttatccaagtcattcataacaattttgaccagaacagaactatggctgggtagcctgatgattcttggcttttttttttttttttttttgcaatgccaatggaaattattccattcagtcaaactatgagactccacttaaaaaatgaattcattgtacgttccttgaatgctaagaccatgtcacatgcttttgtgcgtcccacacagctagttaatactcagtaaaaatcactgaaaggagtcctgtgttctgaagcacaaagccatggagtagatttgagagggcggcactgcctgaggtctttgggttcctctcaagcagtgtctctgctcccgaccgctctgtgatcacccgggcagctcttattcacatgtgccagtctatggtttccgcatgtcactaaccctgcgaacacatccaggatacaatgccttcaacactgggaatctcagtggacactgagaaatttagaatatgaaccacagttaagactgaaattaatcattactggatctgaagtcatctacaatgaagggtttcaagatgagcagtatctgtctactatgaacaagactggagtctagaaaacagagtaaaaacagaagtttgaggtatatccctcacctctgagaataccatcatgattatgactataccagctctcagtgaatatcaaaaggcagcccaagtcattaaaaccacactcaaaagcacctcaggataccaggagttgctaatatagttagtcaaatcatgtcccaggcatgcacttccaggaaaaacatgaaaaacatctctgattttaccctatgacaccaacattagcagaggttctactacatttttttttttttttttgagacagggtctgggtctgttgcccaggctggagtgcagtggcatgatcacggctcactgcaacctccacttcctgggctaaagcaatcctcctgccggagtagcataggccactatgcctggctaatttttttttttttttttcagagatggggtttcactatattgctcaggctggtctagaacttctgggctcaagcgacccacctgcctcgacctcccaaagtgctgggattacaggcgtgagccatcgtgcccagccaagttctactatattttatgtagaataccttgtatacttcatatagtatacctattaccattgtgataaagaacactgaaaatagtgttaacttcaaaaataataacaagcagtatctactaagtgctaggaactgtgttacttgatttataggcattctcttatttaataggcacaacaattttatgagaaatatactaaaattattcccaatttacagatgagtaatctgagacgtaaggaggttaattaccttgcttgtaattagctgagaactaaagcttgaatcctgcattgttaaacgcatcctcttaaataatgtgttagctcaggtcttccaaaaaatcgacatcgagaaggttttaaacgtgtaaagattttttttagggaaaccgtctgtacgagagcaaacgagagcggagaggcctgagcgccacagggtgcaaggccggagtgaccggacgaaggcgtcgcgggaggggctagaggagcagccaccgagcctcgagtacccgggggcaggcgcgggcctcagcgagacgtgctgccgtttctattggagagacaaaatctaaatgttatcaggaggattttcatttatcaggaaagcaactcgaaaacccacagcctgagttcctgaagcccctagctccctcccaagccgcagaggcgtggaaacgccgtggggtcggagtcgcttccatgcggatcctgcgttcaccagcgcccaaaagaggaggcctgcttggcttcccaccgcgccccaaagaacgttcttctgcagatagtcccctgggttcccagaaagcccttgagagaggggcttctcttggccatcttccagaaagttctccatgaggcatttcctgcgccctggagcccatggaaacaggcaggcagttgcgggagggcatcctcgctgaacacgaggctgggacaccagtggctcttcatcttccctctcttatattttctcttgccccagtcaagccaacctttgttttcccacaaaatgaagacaaatacgacaaccgtttccttgattttgttcaaacctcaggaaaggcgggctttgtccaccgtcctgcacccacttaggcagggactgggccaggtgtgacgtcatcaatcttctgagctctggctccagcttaggctgtgcgcacacaatacgcatgcaagggcactcagtggagcctttggataaagctatgtatacatatacctatgtatacatatacctacagtatgaggtattgtaggtactcagtaaaaacactgagtttgttctgtcctgtttgtggtggacggatactgctcattttgaaactcttcattatagatgacttttgatccggtaatgattaatttcagtcttaactgtggttcattttctaaatttctcagtgtccatttagatccccagtgttgaggtattgtaggtactcagtgtttttaaactcaggcagttttatatacatagatgtatatgatatatgtatatacaatacatgtatatacataaagatatatacatctgtatatactaaaagatgagaccttccttttccctggcagacctgaaaccacaatgcgatccatgcatcattttccagtccttgactcttgatctttctgtagtagccaccctgagacctcgggatctcactcctgcccagctgtcttcatacctcctggatcacttctttcttatttctctttctccctgttttctctttacttgccctgtctttaaatgttggcattcccgaaggctctatcctcaactcattctcttctccctgtatgattttatccatctcagacatccttggcccctgcttcttaatttttctctctgctcctccaagcttgcctcaccatctgaaattccacctagtctaccccaacatatcctatcactattctctgtgtaagggtactaagatgtatgaatgtctaaccagccgatgtgtgtgtgtgtgtgtgtgtgtgtgtgtgtgtagtctcacaggccttacaacaatcaagcaaaataggtattagaaattccacattacagataaggaaatcaaactcacagaggtttagttaatagcctgaaatggaaagttggcaaaggtggacctttattttgaactgaggtctgttgaaattcaagggcagcctctccaactcctgtcgggctcttgcacagctgcttctcccacctgctggtggctccagatactccctgcttggtgtaccctcagtgggcctagttaccttttccagaaacgaatctgattatgtctctccttttctataagcccctgttgattacattccaggattaagaccttacgagctggtttggccagtggttaccaaactcatctgcacactggaatcgcctggggagccttgaaaattatcaatgccggctgggtgcagtggctcatcctataatcccagcactttgggaggctgaggggggtggaccacctgaggtcaggagttcgagaccagcatgagtaacatggtgaaaccctgtctctactaaaaatacaaaaattagctgggcatggtggcaggcacctgtaatcccagctacttgggatgctgagacaggggaattgcttgaacctgggagacggaggttgcagtgagctgagatcgtgccattgcactccagcctgggcaacaaaagcaaaactcttgtctcaaaaacaaacaaacaaaaaaaacaaactgatgcctatgtcccagccccagagattaagagttcattggtcagggatgtggcctgtattttgacatttttttaaagaccctaggttattctagtgggcaaacatgtttggaaaccacagagttatccacagatgcccctcacattctgactttcttatctctccagtaactgcctccccaactccaaactgcgtttgaccatccagctcactgtctcggaattccctttttcttggacaaacttccacatcctttgatattcagctcaaatatctcttctgaccattcatgttgccctttgtttttgtcacagaccactcatgctatgctgtaatcttgctgttgacccattggtctccccagacatgtgctgggtaagagtggatactcctcctcttcactatctctgtagctgccacccagaacacaatgcatggcaaagaggaggtgctctgtaatgaacaaatgaattaataagtcaatgaatacccatataagaagtggaaagggcactggactagaatagaactagaataggactctggagacccaaatgtaggtagcagtgttgagtggaaaagctcggaatatggagcagtacaggctggatttgaaccttggctccagttattagctatgggacccttctcaggctgtcaaaatacatcgagtttcacttgcctcttctacaaaatgggaataataatagagataaccctggccaacatggtgaaaccctgtctctactaaaaatacaaaaattagctgggcgtggtggcaggtacctgtagtcccagctactcaggaggctgaggcaggaaagtcgcttgaacccaggaggcggaggatgcagcgagccaaggttgcgccactgcactccagcctgggtgacagagtgagactctgtctccaaaaaaaaaaaaaaaaaaaatagtagtaccttcattacagggttgctgtgaaggtgggagttgatatatgtgaaatgcttagcataatgtttaacattcaggtgttaaaaaatatggtaagtcttattctttgttcatttgtttgttgtgagatttctgatttctggcacattacacactttttcctgtgcccttttttttttttttttttccttttgagacagagttttgctcttgttgcccaggctggagtgcaatggtgtgatcttggctcacgacaacctgcacctccagggttcaagcaattctcctgcctcagcctcctgagtagctgggattacaggcatgtgacatcatgcttggcaaattttgtatttttgggagagacggggtttctccattttggtcaggctggtctcgaactcctgaccttaggtgatcctcccacagtgctgggattacaggtgtgagccaccgtgcccagctgccttttcttatttataaaatgagcagagtaacattgtttcttcctctctcaaaaggaagatgaaagtggtgattgctcaaacactcagaacataaaatgctctacaaatgtaacaagttacaattagtgtgctatatttgtgtttacttcctaatttctgtaccttcactttctgtggtaataccagaacatgggttttttttttttttttttttttttgtactaaaaacccttgacatgggaggggaatatatccagaaacattcttgatgccaaatttgaacaaactgcaagagcagacaagtttccccacaaaactcaacaaattgtaacaaaatatttcattagtgggcacatcttcaggtccataatgatgtgacaaatacaggaccaaagaaacttacagaagcttgtaaaataatatctgccataaaatataatttttcaccataggtgtcaatgacatcactattgtagcaatttcagacatgaacttaataacatttgtaaaaggtaaatagtgatgaagaataataacaaatgatcatttcatgagagctactttgaggtgggtgacaggcagggaagcagaggctgcaggaagatacagactctgggccatggtgtggctcattcacaaactttctgatgggtgtgttccttgcacaggcttcaaattcacactccagtataataattaattactcatactatgacttacttgttggcttcacttgtgatgaataaaaatctttcatgggccaggtgcggcggctcacgcctgtaatcccagcactttgggaggccgaggtgggcagatcacgaggtcaagagatcaagaccatcctggccaacacggtgaaacctgtctctactaaaaatacaaaaattagctgggtgtggtggtgtgtacctgtaattccagctacttgggaggctgaggcaggagaattgcttgaacctgggaggcggaggttgcagtgagccaagatcgcgtcactgccctccagcctggcgacagagcgaggctccgtctcaaaaaaaaaaaaaaaaaaaaaaaaagaaaaagaaatcttgaatgataaattcctgatgactaaaagtcaactatgttcacttactcacttcctataattgccatcaacatgtttgggagcaagagggacaatgttacgcagaattataggactctcaaggaatctcaaattctctgactagtaagctgatcagaaaaaaagtgaaatatggataaaaatacatttaggaaaatagtaatgcaaacttgcttttttttttttttttttttttttttttttgccacaaagctttacttgttatgttcttccctcttaaatcactcaaacattttatttataaaacaaagaatttgtgaaatggagacaaattataatgttgaaatatcattagagtttccttcagttctaccaagcatatttgggcaaaatttaaaatatcctttcctctttaattctgcaaatagtgcaatttcaaatacagcaactatcttctctctgtctagctaaaaattcaatgaaatacttcactttatttgtctaaatagttattctttttctccttggagaatcaaaattaaccttcagttgtgttttcttttaggggatacaataaggtggaatgtttcttcttgaatggttcaagggtccagtatccatcatgaaagaggggaaggtgcagaaataagatggatccaggtgaccttggggagaaatcattcctagtccctgcttttagctccaaaaccatccttcttttgcctttcatatcccttgtccctgaattacagagccctttgacctctgtaaaaggttttttttttgttttttttttttttcattctctaactaaacacaataataaattaggagtccctatctttgtagaagtggtccaggttctgggcttctcccttcttttcatcagcctctttttcctcttgtttaactcttcccaacttatcctcttccccccaaaatgaactaggcagtcttaatgactctgccttaatctcctcaccaagtctttcttcctttctgcagttacgccttagacatgcgcactgaggggctcctgagctggcctcagccttagagagcctgcttgggtcctcctctgaccacatacatgtctaccaccgcaagtagtctgcagaagcaaggcaagagcctgtgttcccacctctagaccattctttggatacccggagccccagattctctgcttagagaatttcaagtctgttttcccaggtccgtcttctggaaggtggccacacagctgtgtgcacctctaggcccaaagaatggccaaggggcatgcaggtggaccttggaggtatggccaggaatgtcccacaaatgtaggaagctcctgaggtacaacacagagccagggatggaaagggaattgggtggtccagggaacccaacctgcagaacccccaggaggcagggattctacatcaaactggccttcccagtggccacgaaggtatacttgtcaagatcagctgataggacatattgtacttaattgtttgttagcttgaagtataacaattaaggatgaggcctgtggtacatctgcactcttgccttgggctccacaaatgttagggagggacacgcttgtctctcctcacccagcgattttcctgcagatcttctccagtgctaaatgcacatggatttaggcagtgaatacagaacaaagtttggaccttcagtgtggctgagtgcctattcctggtagccaggccttctttgcaccatccctctgcctcttcagactcagtcaccgacagaaggcagttaatttgtaaacaaggaagataagctgctgtgtgtcccccagagaggttttcacggagcttgggggctcctgggtcagaccccgcccaagatggaatctatttgcggcagtaaccacagacaggtgacctatttttttctttattgattcttctctcttcctcactgtcttgtttcacccctcttttctaaagtatgtttcagacatagagggagaggctgtgatggaagtcagccaagcgaagacgaagggtgggggagcagtcggcaattccagtttgacgctaatgatttgtgtacaattcaaggtcagagaatgatatgtgaggcttgtgcgcccacccacacaagcatacacaatttagtacttgattatatcagcatatagcgctaatacatctcatgctgccttgttcacttgcctttccaattagaaagaaacgcagagggcagggaccacatgttaagcttcttttgttcctcgcagcacccaccaccttattaggcacataatgggcatttgataaatatgttttgttaaaagaggcttgctttaatgaaataaaatgtgttcttgaaatgtgctaaataaagtcagtttttgtaaatggaatccgattttaatgatactgggaaagttgcaatgggaatactacaataaatccttttacaaagccaataaccattccgtctggattgtcatgtattttttaccctcttggacctaaaccagaaaatcttaacccaggaatcattgaatcccctgcaaatgtgtccatgtttgctttgggaatgtgtatttttctggtgatattgctgtagctttcattgcattctcaaagggatgtgttacttcaaaaagaaaaaaaagttaaaatccataggcctagagggtgccacagaaatgaagctaaggttctaggaaagtaatttaccagctttggtaagcagaaaatgataatcagagttaacatttgttgagcatctgctacataccaagctcctgacagtcaccatatttaatgttgcctgcaaggtaggcactatcatctcatttggccaatgaggaaactggagaggcttgccccaggcacatagttgttaaacatcaaatgtgagatctgaaccagaatctgttgattccaaatttggaagttttcaataaaatggtttctgtttctctggtgccctacctaaaataataatgatgacaatgaaaataataatttaactttgagaatattattatcactatttcacagatgagaaaactgaagttaagaaatatgtatgaaattcaaggatagctaataacttactgaagaccctgcagctggtaagtgaaggtccatcccctggctgaggccaccgccccacactgccttcacagcccctgtgggatggcctggctgccccgggactcttaaacaaaaatcagtgaactgggtctttgcttcagcataccataattattcttctggaattgagttctcttccttcacatttctctagagagaagtccaatctgtcaagcatttataaggcacttcttttgtacctagggttgtgttaggcactgtgggaaacagggaaacacatctgtgggtgtgagtgtgtgtgtatgtatacatgtaaaacagccacactttttaaactaaaatcctacatattgttttagaccatctgattacacttaggagctatttaggaaaatggtgactgtgcaatcaactgtgcaagttgtataagaaacactccctgttcaatctgcaaggcatactacctacaaatttagcaggaatttagagacagtactgttgatattggatatatatggaagtttggtcataggatcattcaagattcatttgacattatgaattcattccacttagctactcagcttgatactacgaaaataaattaaaatgtgaaagtgctgttagctctttgaaagatcataacattgaaattcaagtttaatatgtcacctaaaaggcagttttacacggaagttaagcaaagcctgggccctaaactcaaaggtctctgagttcaaatctctgctctgccatttactagatacgtgctcttagaaaaaattcacttgatgtttctaggccgcggtcttctcatatataaatggaggtaataatacctttatgacaagccttgtgaagattaaatgaggaaatgtgtgcagagtatgtggaacaatgcttgaaacattgtcttcacttaaaaattgtggcattttgtctttataactttgtgtcaaaagaaatagaatgtgaaaaaaaaatgaactggtaaaatttctctctaaaaatcaaaacaggataaaggagacaaataaaattctccttctccacgagtgatagcagtggtattaaaacacaatccttacagtaaaagctcacaggaaaagaattctaaaataagtcttttcctgtgcataggtttatccaaatttctttctcaattttatttattgctgttgacgtttaattgctaaaataatcttaagggagccacagaaatgggtggggcactcaagaactgtgctatggtctttctgcatgtcagcattagaacagattatttcaatcccatgtttgtgtggaaagcatgcaaagagaagatagattgacaagcctgattggtatgttccaattcttttgcttccatagcaatttagtatatggaagtcaaacttctttaaaaatcctagtttgcagaaaagaaaggctgagtgctggcagcagaaggtacatgatactggggaactctactctttactccagttgacaagcaagcaattagatccatcgagctgcggatctatgttctcaaggacccaaggaagtcagcttttggaaggcaataaaatttttgtttttaatatgcagtgtccttcagtgaaaatgacaaggaggctgaagtaactttaggatgctgcagacaagaattctttatccagagataaaggtgaaaagacccaagaagctggataagagctaaataaaaatgtcttgccaaaatgatgctagaaagtactaattctcagacatttgcagagtatttctccatgatcaaaaggcatgcagacaagaaatacaccagcacctatgtgcatgaccaaccaaataccaccccacccccgcggccaaactccaacaaaacacacgtaatattcattaaaaaagaaacctttatctgaaagatgggatggagggaagagtgagggggaagaaatatagaaaagaattgcaatttgttttaccacctattaccttctaggagataaaacgttctgaagctaacaggccactgccttggcaacagtagaaaaaaatatgagatcagaatgttggctgtgatcttgagatggctttcttgtgcccatttcattcggtgagtgtcaacatgtaggcaaaattgcataaggtttaagagctcaggtttggattcaaataggctttgctttggttcctagttctagtgttgaccatatgaccttaaacagactacttaactttacatgtctgaatttcaagatcgtttgaagattaaatgtttcatgtcaagggcttagtacaggtcttggcacataaagcgctccatgaatggtcactgtgaatatgtaccttactgtggatcagagtttctcagcttctgtactatcgacattttgggctagataatgctttgttgtgcagagactgtcctgtacattgtaggatatttagcagcatctctgctctcttacccactaggtgccagtagcagcgtcaattccccgttcccctcaccccaccctacccctggcccccaagttgtgacaaccaaaactatctccagatgttgccaaatgtccagttggtgattggggaacaaaacatctgaggttgagaaccactgctttagatcaatccaagttctagcagatgagaataactccattcttcttttgatgtatttattaatatttttaagccttgaaatgaaaaattgctttttaagcattagaaaatgcatactcttcttttgaaagcctagcaataaatcccataactatcagggtcttcgtttcctcatcttgagccttatttcaaggctccctctgttctaaattctgaccttgaaaactctattcctacctctttctttttttggacagggtctcactctgtcgcccaggctggagttcagtggcgcaatcacagctaactgtaccctcgacctcctggactcaagagatccttccacctcagcctcctaagtagctgggaccacacttgactaatttttgtatctatatctttcatttcaccaaagatttaaaacaatttctcactatgaagaaacttatacaagcaatatacattcaacaggaaaaatgaggaaattcagataagcaaaaaaagaaagaaaggaaaagaagtatcagttgtgtttccattagttagaactacctagggctaacatgatgatgagtgggttttcagatgtttttggaatgcatgtttgtgtgtacatacacaaatatacatgcagtcacacaatacacacattttatttcttgtgtgcttatcattttttcatggtatatcattttttcatggtcattagttctagctatctccagacttgatgctagactatacattttttctcatgtatgacattcctcaagaagtggttcgactcatatgtctttctttacctaccacctagataagccccaaattcacactgttactcctttatttctccacagaaaaataactttcattacatgtacaaatgacaattaagccaattagagtaaacaacttttggtcaattcagctctcactttgccaggaaccaatggccatcctcagttttttttaagtatggaggtttggaagtcaaatttgacgcctttcttcctttcctgtccccacccctgcccacagtcacttccacaatctcttgctttttctttggacctatttccagggtcacacgcagtcaggtcctaattattttgttccaggtatgctgtttcctagcatctctcctgccaatcactttgatcgagatagtactctcctcttttcagaaacctacaatgactacccattgcttcttgtatcacaagctgaatctctctaatgagctttgaggggcttccacactcccctgggtcctcctccctgagctgtgtcttcctcaggttgcactttttgttccttattaacccttcgcaacccagtttccctactcccctttctgatcaacagtccattaaaaataaggtaaaacaatgcacagtgctgacgtctttttaaaaagaagaaaaccctaggacactaatacaattatccttttgcttatgcttcagttatcggttgtaactacttgttacattaattgggtgtatctttgttacagaggattaataaatgttttatttatttattttagtttcaaaaacatgccttgaaatttcaccagattgggtgaaacgtgtttacaatactaggaagtgaacagcaggcactaattttttgtagcagtatttctcatcaaggcacatgcatttacctaatccaaaagatggctagctttctcagttaaaaggtatacagagaaataacccttgcatttgatcattgtaacttggacaacatttcactctattgaatataaacgggaatctgtatgctgttattattttaaaaaaaattttttaatccagcttttagtagaggataaacttcttaatggcaaggaccatggcttttacttcctttgtgaggctcacaataatgggaacacagcttcatgtgcaattggtcttcaataaatgttgctaggtgattcatatttgaatgggaaatggaaagaaaagcctgacggacttaaaggatttgtgtgcatgcatcttgctgtgaataatacaaatgtggagagagatgactaagtggacagcatagggcatagagagctttggcccctgaaatactcagtaacaggaagttacagtgtgactaactgtaaccaggttgtgaaatggaaagcagaggaactggaggatgtactggaagaactcaggggtgcacacagaagtgaactgcagcatcaaagatgtaatgcctttccgggtgagaacttcagaaggaaggacagcacaggggacaaaggaagggatagaaatgataagtgtcttaaaatgaaaaggtgatggaaagaattcttaaggcagaaataaaaatcctatcaataacaaggttgggtttagagttaaaaaaataatcacacggccgggcacagtggttcatgcctgtaatcccagcactttgggaggctgaggtgggtagatcacctaaggtcaggagtttgagaccagtctggccaacatggcaacaccccgtctatactaaaaatattaaaaaaattagccgggcatggtggtgggcgcctgtaatcccagctactcaggagactgaggcaggaagaattgcttgaacccagaaggtagacgttgcagtgagctgagattgtgccactgcactccagcctgggagacagagtgagactccatctcaaaaaataaataaataaataaataaataaataatcacgcagatattttgtttcctactttaaataaaagcaaggcttcacatttgaccacagaatgttgtattgcttctctgctatgtggcacagctttgatatcaggtccaggactgctaagtgaaagaaaagaaatttctggtatgtttggagcctatgatttcatccctcctctcactccagcacatctgatctatgtatcctcaaaaatggagctgctcacctttgccagctcagttcttcccatcctaagctttcctgagccagtaccacttaagcatgttataaaatgccaaagccattcatggtcattatggtgtccacaaatatgttcacaaattcttgacactcccttcagaagggagaacctaatccctctctcctggagtgtggctggacttaaattattttgcttctaatgaatgaaacaatgaagaaacgaaggtgtgtgatttcgatagtatgtcatgaaatgaactgtggcttcctccttggtctctcttgaagctgactcaggggaagccagctgccatgtcatgagaaaacttaagcagccctgtggggaggtccatgtggtgaggaactgaggcctccagtcagcagccatgggagggagccacatatgaagtagagtctccagccccagtcaagccttcagatgactgcagcccacttgacagcttcacggtagccttatggaagagcctgagccataaccacccagctaagctgctcctgcattcccttgaaaaccatgtaagataataaatgtttgttgtttgaagtggctatgttttgagcataagttgttacacagcaatagataactaatatggtaatctttccaatagagctcttctttactttggagttaagtttttaagttttattaaaaggtcttttcattattttggaatatgtgtttacctgcatttaatatgtaaatggatcagatgttataaaatgttcaggtaaattaaatcccaccttcttttttagcttctgattttaacaaagagaaatgatttttctcatctactgaggtaccagaaacaatgagggtactgtaaggcctcaaagagtctaacagacctctagagttaggagtggggagtggctagattatgtcttgagatgttttcctcatttaaaatcatttaacataaacaaaaaagatggcattttaatattgtactttaaaatatgaaaaataaatagtttttattttaaatagaggtaaattatgcaggaggaacaatcttgtcagagccaagattgattttttttaaaaaaatcaccagtgaaacttgctaacagttggcttttaaaagagaacagtaatacacttttaccattttgtttacagtccctgtctataaaattttcacatatatatgataatatatttcttccagaatctttctatctttgtatgcacaatgcctagacaccacaggcacataaaatatgttgaatgaatgaatgaatgaatgaaactggcttaaaggaaaactgaagaaacttacactctcctagaggattaaaaaagtacaaatcacacgatatgattaatgtttttaattttaaaaacacagtacatcctatgggtctgatactattttaaatgcttaacgtaaactaatacacagagtcatcctaatatctctattgattatcatcccctatctttccttttttttttttttttgagatggagtcttgccctgtcgcccaggctggagtgcagtggcgcgatctcagctcactgcaagctcctcctcctgggttcacgccattctcctgccacagcctcccgagtagctggaattacaggcgtctgccaccacgcccggctaattttttgtatttttagtaaagatggggtttcaccatgttagccaggatggtctcaatctcctgacctcgtgatctgcccacctcggcctcccaaagtgctgggattacaggcgtgagccatcatgcccagctgatcatccccatcttctagatgaaaacctaaagtacaaacaggttatataacccgcccaaggtcctgcaagttctgaagtggtaaagtcaggatttgaagatctgttgtggcttcagagctgactcccgacctctacactctgccaccctccctacgaaggcagctccttatatgatcctacctgatgtcatacctaggcagttctcaagtcaggagaaggtggaagtggtgggagcgctgcaaaaacggagagaactgtgactgctttgcagtgttttggggaattgtgtttattcaccagtttctctcactagaccgccaatttaacactctgccaactgtccaattattcatgttcacgtggagctaagtgggttcttctccagctgcacacctttctttctcaacataattaatgaggctcatcaaaaccctagaaaacaagcccagcgcaccagccactctcattgacatgttaatagggggtcaggtgctcctgacctcacagcaggatgtttatatggccccagggctgctcacaaatgttatatgttgactacagggtgtcatgaataagggcgttcctttcccagtaagcagctgcactacacacaaatggccatggaaatctctgaaggcagtgagccacacagatcaggtgaattctaacagcatgggcacaaagccggctgggttggcttatccagagcctggccaggcggagggcactggaaagcactaattcattccatccagtgtaggattacatagtttttaaaaggcaatgtaaagagtaagagactcacaaacagcaaaaaaaaaaaaaaaaaaaaaaaaaaaatcacctctggtcttgcctattacttttctgatcacagaactgatttttggtgtttttctaactcgcgctgttcaacacagtagccactagccacatgtggctgttgaacacttgaaatgtggctggtccgaattgggctgtgctataagcataacaggcacatcagatttcaaacacttggtatgaaaaaaaaagtatgtaaaatatgccattagtaatctttatattgattacatgttaacataatcatattttaaatatactgggttaaataaaaatatattaagatgaatgtcaccagctgctttttaccttttgcaacatggccaatagaaatttaaaaatcacatagtttgcactggtggcttgcattctattttgattggacagtgctgctctagagtttggaaactctaaacctgtcactgctttgagagggatgcaaggggcaagtgtgtttccaagtcttgtctctggactttttctgccacactaatgaaactcttaccaatgggtgatattgaaactaacactatctaccaggaaggctgcaatacactcagatgtgaatcgcctcctgttccagggccttcaatcacccttctattcgcaggctttgaagtacaggctctgactggccccagcaagagcacactttggcactctgtggcacatgtaactcattcttattgcactgatctaaaacctagctctcactcacagtggcttttagggaatgatcatgtggacccaggctgccaccgatggctgtgcagtttgtgcctggcacaacagtgtccagcagagggtacacaaggggttgccatcacacctggggtgcctgcaggctggggctgcagtttatcggctcagaggcgttgcctgaagtggactgcactctacacccaaggcaatcttttttcttgcacccctgactaacttccacatggcactgaaagtactcctggcctagcaagcccattaaaacatcctttgtatgaattggccagagcccagtgcagaaaagcaggccatataaattcccaaacatctcagatctaagaagagcatttagagaatgcagatatgtttataaaacctcctgtaggaaatcatgatattaataaatgggagttattagtttggatataatttggggtcactatttactgctgactaaataaaacatataggtaaattgcataatctcatgtgtcatattaactaatcatgacaatgtattggaaatctaactaacatgaaagatattttgattctctatgtactagatccgctgcaaaccatttgttgtcataaagaggatgaattctagagaatcttgcccaggaaccaaaatataatagagtatctttgtataggaaagcagcatttccccccaccccccgaagagtattataacctctagaagagcccagagttgtatgaatagttaatgaacgatgacataatatactttaaagcttggaactgtttaaagtgtgctccaaaagactatctttagaaaggactctcttcaaataattgctaagatatgatgaagtaaatctttataataaaaatattaagcaaaaggaacatatgatagtctgttattactctaagaaaaacaaccactttcatagtgatatgaatttactaaaaaataaacacctaaaaacaaaaagcccaaccataaagcacagagtagctatttgtggctcaatgctgcgaaaactttttaaaaaatagccatgagcttgcttcacaccttttgcagagtgtgggacaagtagtacctcagaaaactggaaatataaaacagaagaataagataaataatagcaaagtaaattacgtgtttaaattgcttttaaatatactgtaaataagatttgattatttacatgtatacatgtgatcatctttcagaaactattataccatcccaatatttaatcttatgatcataaatatttgattcatttccttttatcttgtcatttattcaagcaccaagttctgttacttcttccctctaaatgccactatggccattgttctcttaaattttaactgctgtgtccagatagacattcttactgtctcacactcaaaatagtagaaagtcctctaaatgttctcccattcaaattttgcctcgctattccgcaccggaacccttccctccagcctggctataatctaagttggccacggaaggaataatgctttgccgccagcaggatgcctttctacccaccctctatcccgccaactcctactcattcttggtctatctcgaagctcagttgccctctggaggctgctcttgtcttctccaggctgcactgacccttgctgttctccctgccctgaatcctgaatgtaaaatttagtaaggtagcactgactactcgctcccttgtatcgcccttatctccctgaccagactgcacattgctggacactctaggttacactgttttggtatcttgctttggtccataatatcatgactttgaggagtgaatatacacagggaggatatgattggccattttacaattttctacacctgtgtcgaacccttaggctagtaggctcctcttgggaaaaaataaagctgggcctactctcttacctgtgagtgcactgggtaggggcctagggtgtagcagaatgcaccttgaaaggaagggaatctaagagtctggaaatggaatgaagttgggcatccggctgaggcaacatctccctgaagctcaggagcacctgggaaagttgcttgtctgccatccttgatgtgattgagcatcagaacacggaacacagggttgtggctgacctctgtgcctgagagcagtcttgctctgaggagaacagcccgaaagaggccctacataagccttgtgtcgcctttaatgtgtgtagtatccattcctttgcggtctgtctttctatagatcttaaggaaagcagcctggcactataagactgtgcccttaaatcctgagacagaaaaatgaataacaaaccctctcttggaggaaaaatcccactcttcaccacattgggactggggagaagggaccactggaggatagactactttgtcctattcagagaatcaacaggacaataactgccatatttaaacatatacaaatatttagcaatgaaataaacacaggctgcttgaactgcagtctcagtgttatgttgctttttgtttgtttgttttgcgcccagcccgcagtgttatcttatgtactatttctccatttgaaaatggtagtggtggccgggtgcagtggctcacgcttgtaattccagcaatctgggaagctgaggcagatgagtcacttgaggtcaggagttcgagaccagcctggccaacatggtgaaaccccatgtctactaaaaatacaaaaattagtggggcatcatggtgtatgcctttaatctcagctactcaggaggatgaggctcaagaatcgcttgagcccaggaggcagaggttgcagtgagccaagattgtgccactgcactccagcctgggtgacaaagtgaggctctgactgaaaaaaaaaaaaaaagaaaagaaaagaaaagaaaaaagagaaagaaaatggtggtggtggtagtggttgggagaaaatggtcgtggtggtgatagtggttgggagatgtgggcgggggggtggggatgttcattaaaatgcacattcccaggcctcatcccagatctacagattctgggcctttggcagtggaatctgattgattacctgcatcttgaatgctttccccaggtgattcttaggcccataaatgtttcagaaccactgttcgatgggttatcagctctctcagcaaacaagaatattctcatcccctaaaacctttaaggagtattttcataggagtgcaattaaaacctctttcgggctgggtgtggtggctcacgcctgtaatcccagcactttgggaggctgaggtgggtggattgcctgagcttaggagtttgtgaccagcctgggcaacacagtgaaaccccatctctactaaaatacaaaaaattggctgggcgtggcggcctgtgcctgtagtcccagctactcaagaggctgaggcaggagaattgcttgaacccagaagacagaggttgcagtgagcccagatcgtgccactgcactccagcctgggtgacagagtgagactccatctcaaaattgaaaaaaaaaaaacaaacaaaaaacctctttcttctagaaagctcattcctttcctaaaatgtttccttttctgctgctttctcttagcctcatatttctaaaactctgacagaatatcagtttccaaaatatgccaggatgtacacggaaatgaggtattttacccatcagcaggggcactgcacttaagatctggattttggggcccttctgcttgctggtttcccctcagcagggaaggcctggattcagtcagtgaggagtgttctgtccatattccaccttgcccctgagtggccaggtactactggcttagtcagagtcatgaacctaaactgttttcatagtccttgaagtaagtcagtatttcaagattctgaaaactactcaatagttataatcacaaaatcttcttccaaaatagcatgatgatcatgttgacactgttgtctttttcaatacatgtatttgacatgtgtaaattttgtgttaagagagcacttttggttttgtgaaacccactctattggagccaaaagtgttagaaacaataatgtgaattctgctgtaaaattataaatttcaatttggacaatattcgatattcaacagaaaagtgttgaaaatcactgaaggagcctctggtagaatgaacacccacattaatcttggcttcctccgatgctccagtacaatcacaatacaggaataaaaatgacataaatatttaagaacaaagaagatgggagatggcaataggaattgaggggtgtcaacaaaattttgggagatgaaaatcagctggctgagtggtaaacgacttagcagcttagagaaagctgaatctaatcctgcagtagaagaagccaaaaatcaagcaagatgattcaagctaaacaacgctgtgaagacttaggaaccagaggcacctctgaatgccagggtagatgggagtgcaaaaaggaaaactggctgcaatcctgtataattaagaatcggaccagataccctccctcagacaagaagaaggcgggtggattactctgcagagatgaaaccacaggactctggaatcctggatcccaggcctagccagagtgggttgaggagccatatgaaaacagggagattaagtgaaagtctacatagaacttagtaagacacgcccctcagcatcaccaccatttcttacctccctacccttattcagctccagaaagccagcatccaagtttacaaccctcagccatgagatggaagtctttcctgtctagcttaagggaaaacaatctacaaacattgacccagtgaaatgggcaggttctaggcgaatcaccctataacaaagcaccacactttacaagccccatctaagcacacagagcaactaattagctttattttgcctctctcttaaacagatatttgagaaaagcttcttttatgaaagaaagaaaaacaagcatatgaaaaaatatgcttaggagaaacagacaaagcaggaagcacaggaaagcttaattgtatttatttatttattgaaacggagtctcactctgttgcccagactgcagtgcagtggtgcgatctccgctcactgcaacctctgcctcctgggttcaagtgattctcctgcctcagcctctgagtagctgggacaacaggcatgcatcaccacgctcggctaagttttgcatttttagtagagacggggtttcaccatattggccaggatggtctcaactcaagtgatccgcccgcctcagcctcccaaagtgctgggattacaggtgtgagagccactgctccaggcctggaaagcttcattttaaaatgataattaatagccttggattgaaaaggataaattagagtatagaaagagcctatggaaattaaaaatgtgataaaatgaaatatttaataattgggttggaagatgaaggaaatctcagagcatagagcaaaaggacaaagacatgaaaaatagaaaagatatgaaaatcagagtacaatccagaaggtttaatacataataaacagaagtttcagaaagttaaaaaaggagaaaaaagaagagagaaattaccaaagaaataatctaagaacatatccaagatcttaaggacacacaattccagattttttttttaaaaagtgcatagtactagatacagtgaatgaaaaagagctgcaataaggtgtatcatcatgaaatttcagggtaaagaatattagaaaagttatcagagtgaaaaaaaaacaggttacacacatagggtggggaatccaaatggccctggacttaatagtagggaagtcagaggaccatgaagaaatgcctttaaaattctaattaaatgtgttttctaaactgtaactctataggctgggcacagtggctcacgtctgtaatcccagcactttgggaggccgaggcaggtggatcatctgaggtcaggagtttgagaccatcctggccaatatggtgaaattctatctctactaaaaatacaaaaattagctgggtgtggtggcacgcacctgtaatcccagctactcaggagcctgaggcaggagaatcacttgaatctgggaggcagaggtggcagtgagccaagatcgagccactgcactccagcctgggcgatggagcgagactctgtcttaaaaacacaaacaaataaacaaacaacaacaacaacaacaaaacctataattctacatcaggtaaactattaatcaaatgtaaggataaagacagtctcaaaaattggttccataggaacaatctcccatttacccttttgtaagaaactatgaggacttccaccaatttgagggaataattcaagaaagaggtgggatcgagaaaacagacgacgcaacacagaacggtggtgaaacgttccaagaatgatggtgaagggtgattgcaagacttccgttaagcagcagaccaagaaaactgcaggacagaagtggacagaaccaacagggcagagaacttcaggagagaaggaaagacggagggagggagagagggaaaagaaaaggaaacatgagaaaaactatattatctgatgtgcttgatcatattgaatgttttacatggtcagaaaagtttaaggatggatcaaaagtaggtacagagacaatacatgcccctcaccctgcccaaaagggcaatcataaattccaaggaaaacaaaaagctatacaagtaaggaaacaaaatcatagtatactacatggctaaactgtgaggcactatgcaaaaattagtcttttaaacatgggctactttttaaaatcatgatttgtaatatagctagttacactgagaggatggggaagagaaagagagagactgtgtgtgggggggttgtgtatgtttgtcaggaggtagtataagtagctgcaccccccatcttctgtagaattgagtaactgaaaacttgagaaatgcaatttatggagataaatgagaagacaacatggaagtggctgcctttggcaagcagaaattaagagtggcgtgggtgaggcaggagactactgtttctcatcaaaatccccctagcagtatttgactttctgagctgtgcatgtgtattacttggataaggtaaataatatatacatcaaggaaactgaaaaaaggggttccaggttcttaaagtttttttttttttaaataattgcttgtctttttttttttttttttttttgagagttttgctcttgttgcccaggctggagtgcaatgggcagtcactgaaacccctgcctcccaggttcaagtgattctcctgcctcagactcccaattagctgggattacaggcacctgccaccactcccatataatttttttgtatttttagtagagatggggtttcaccatgttggtcaggctgctctcgaactcctgacctcaggtgatccacccgactcggcctcctaaagtgctgggattacaggcgtgagccacggcgcctggctgcttaaagttaaggaaaatgtatcttccaagagatttccatgatggctatgaattttgcagctctgttctttctctggagattttatgactaaaaagcttataataatataccacacagggcattccacaaattctggtaaaataaaattgaaagtgaaaaacattctgtaaaatatgagcacatatactcattatgatgcacacagccacatgtagaaaacatacgtgtaaagaataaagtagcagagtcacctatgatgtatctagtcctaagactgcaagtatgaaaaattaacaccacattttggaaatgattccctttctgctcttccccacaggagttattcttgggctctgggctggcctgtgaccgtccttgaccagcaagtggtctctgcttttggtttacttctttcatagttgctccattgttttttgtttgtcagacacagggattgtggttgccttcccagcaatctcactgttgttccgctggttcaagataatcacctcctatcaaaggattcattctagacttgccttttcagcttttctatttgatctcaaaagcggctctgtgttatttgtgctaatgctttctccattggagctgataatcaactgtaatcatatttttgacccaaactttgatgatcaccatcaaatgatttattgaatatccttatgtttaagacacagtgctaggcactatgcaaaaatcagctaaagtgtgtgtgtaagagagaagagagagagatcctgcccttgagaaacaacaggattaggacggaaaaaaaccagatgtgaccatagtaagttctatttcataacaaaaacacatattttaaaaattggagaacatgtagtgtatatttcaaatagttacaagtgaggacttgaaacgttcccatcacatagaaataataaatactcaggccgggtgcggtggctcacgcctgtaatcccagcactatgggaagccaaggcaggaagatcgcttcagttcagtggttggacactagactgggcaacatagtgagaccttgtctctactgaaaattaaaaaaaaaaaattagccaggtatggtggcacatgcctgtagtcccagctgcttggggtatgaggtgggaagatggcttgagtccaggaattcaaagctgcagtgagctatgatagtgccactacactccagtctgggcaacaaagtgagactctttctcaaaaaaagaaagaaagaaagaataaatacagtgatggatgccctaaataccctgacttgatcattacatattctatgcctgtaacaaaatatcacatgtaccccataaatatgtgtaaatattatgtattaatgtttaaaaagtgaagctggtaagaagaaaattagagacaatctgggaggtttagtccatgatgaatagaagttccagaaggttttaaaacaaaaaaaaaagtaggccgggcgccgtggctcacacctgtaatcccagtaatttgggaggctgaggcgggcggatcacgaggtcaggagatcgagaccatcctggctaacacggtgaaaccctgtctctactaaacatacaaaaaaaaaaaaaaaattagccaggcgtgccggcaggcgcctgtagtcccagctactcgggaggctgaggcaggagaatggcgtgaacccgggaggtggagtttgcagtgagcagagatcgcgccactgcactccagcctgggcgacagggcaagactccgtctcaaaaaaaaaaaaaaaaaaaaaaaaagaaagagaaaaaaagtaaagggaataaagaaataatataagaacaaagaaataatataagaacatatctcagagaagattcaaaaacttttaatggtaaaaaatgttattgctactttcactgtcactaatttagctaaaattttctaggaatgagaacatggtaaagggattaggagacagaatggaaaagaaactgagtgtgggaggcaggttttaggactactcactaaagcagggattcacaactaatatatgtcaatgaatagcaaataatgatattgtctcaatccaactggcaaatcaattcaactaagaatttttttaaaaaaagaattaacgaagggtaaacttttttaagtagggagtttcccttccttaaaaaagtattttcccagagggtagaattaatacacatgtatgatagaaagtttagaaaattcagttaaatataaagaggaaaacaataatcactcataatttttccagccagaaataaatatcattcctaacattttaggaattcagtatttagaattcctaaaataacattttagttattcagtatttttctacacatattaaaagtcacaatttggattgtaacatataattgttttatgatctattttattcatattatgagcatttccatatgattagtcattcatttatatcatgaatgtcatgtacgtatttatttttccaaaatacttatttttggatcaaagttttcactatcataagtaacaccatgagcataatctttgttcaaccatctgatcaaaaagaataatatgtaaattctgagaaatgcaattactagataaaacacattcaaaattttgaaatatcttttgtttctatttttgtttccctgttttttgaaatatacaggaagtaagcgcattcctattcatttctgagatggcattttatacaaatgttccaaataagtaaacatctgtaaaagacaattttcttgaaataaacgtgcctaaaaggctttgctgctgaagtcattcattaaaacgaaatgttgatcatggtcattgtgatcaacaaagaataaagtgagttttcactagcaatagcagaaaacgaaactgaactaaacctatgtataattatattttatatcgtacctgtaattcgtgctcgtatttgtggaatgtacccgcatataatgtaatgaactattctgagaactatgtaaatactgcttcacaatcagataaaaacaagaaataaatgatatgtttgcagaaagacattcacatgtttatatatgtattttgaagctcgtttcaaacagtggtgagttaatatttcattaaaaagcacgcttttacctgatgagattttgtgaggttaagaagtgattattctaatgaggactcacaaaagaacattctgtccacactgaaaatacttcgtgagacgagagaagagaggaggagcacacagatttaatccagaaaaacatcactttgcttcttcagctgactgagctctttcaaaacatgacctctgcagctaccagcttcagtgacacatagttaggcaggcataaggacctcaaagaagtacccttaaaactcatgttcccgcaaagacaggaacttgtcccaagttggcacattttgaaagacatttagtgggggtgaggataggtgcatcattgcactcacatgtctgcagagcctgtgaactggaattaattattcatctttggtctggcttgaaggaaatactctactgtagctagtgtaagaacagcgaatgtagaagcacaatttgtattaacaacagaccattctgacagcttgtgatctcataaaccttctgacacgcctgggctactacaaacattcatgtatattgcctatatttctgcctgcttcagaacttaatctggagtatataaaatgctgttatctccccaatggtatatattcttaatgaaactaagataatatatagaagttcacatttcaatgatatttttctagtagctactgattgcagtcaatgtaaaccaagttatacttttatttatccagacggaatctttagagccggctggcatgtgcagacaagaagccactgtgaggtttgggggttgtaaggctgaggacaagaatgaagccacagagctcaggcctgtctctgcaggccagcaccacctccagccctgcagctccatcaagcttggggtttcgggggtggggtggggcactccaggagctacaagatgcaaataaccaagtgaggcaagatctgcctgcgttatttcccagtgcttctaaagtactcaactgtggacacctacccaagcactagttagaacctgtttagacatgagggcctctaaagcaaagacttttctgcaaattctccaagtaaaatgaccatgtctgcatcctggaagaattgaggcacagcacagcaactggcagtaagatgatctctcttgaattcatccatgtagggcagggggagtcgctttaatgggcatttccccactctctccttcagggtagaacaaatgttatattaaaggagctttggctgtttgccactggtcaggatgaagagactgaaaagcttgtcaatgactattcacttcccgactggttgctgctcattttttaccatgcataccaagagcccaacctcccatgaaggaggacagtgggaaagtagagactttaatacagcactaagatatattcaccatcacattttcctgaaatagagctgattgtatcagagaggtttcattgcactcccaagtaagaagactgaaccagcttctaactgttgctagtctagcagcaagtgtttaaacattataaggtcctacaaaaatctaccctccacttcactttgaaaatccagaaagctctcctatatttgaatatcaacaagccaaatttcccattattcataattcagtaggacagctgaaggctgctcagggccttataaaactgttgtagacagccctgaatgtcccctgcttcccaccacccagagcctgggatcatgcaagctgggagagaagctacagaggtagtgccgtgtttggtggagtgacctctgcagcctccctccctcagagtgagaattttatgtaattcttatctgcagttgggaataaaagaagtttgattcctagacactgaaatacacgaaagtttatcatgccacccttttccatttcttaggagaaatggaaaaagaacactccaaacctggccactacctgaggatgtgtaaagaggttttctgcaggcaattagaccccactacagtggaagcttgtagaacatcacacatcgacagtctgaaatgcaccacaagaactgctcgaagagtgtgtcactttcacacttacctgaccgtgggatggaagtgcagcgtaagccatgggctgattcatcactcctttctgcttcatgagaagcaggcgtttctggtcttcgctcaggtgtgccctgggggcctggagctgtggaggtggcggctgctgctgctgctgctgctgctgttgctgttgctgctgctgttgctgctgctggatatacggcatcaaggggtttttgttggggttggccactggtggtgtcatcctctgactcaggtctgcattgaagtgggtcaggggtttagtgttgccataagtcagaatattgtgctgtttgtttaaggagtttgtacccaagttatttggctgctgattgatcatattcatgtgattctgagggaggtagttattcattgttgtcttctgcaggttgtttgccattggaggcactatagggttttggttgttaaaggcttgggggtacatcattgggctatttggtttttctgcagtaaaagctgctccatatggactagagggaggtcctaagggagaccaatttgaagtctgatttgagtgctgttgctgctgctgctgctgctgctgctgctgctgctgctgctgctgctgctgctgctgctgttgctgttgctgtttctgctgcatgagtttggccctttgttgctgctgtgcagccatctgtttgagctgttctgctggagacatgtcagagctgggcacagccacaggccctgacgctgaaccggccactgtcactgctgccggattcaggagataaccatttccaggccgaggtggagcttggcctggagtgtgggcttggtttggagtttgaggggactggacagcacagtttgctggtgagcttgcagggtttggagctgcgggagtgctggcaacagaaggtaaactagtggccgtggagacagtagaaaagggaggaccagaagaagaaggcctcgcctggggagatcccatggagacatgtgcgaagggagagtgagaggggtcgctcttcacgctcgcactctcctgggagagaggggtctcagttgctggctgcgagaattctggctccttcttctcttcaaagtcttcgttgaacaggtcctgtatgtcatcctcaggaaccgtgttggccaattcatctattaattcttgccactcctgatcattcagattaatgtctgagaacagcttgttctgatttgaaagagatgtttctgatgtgtctatgcaagtagggtcatcgagaggttcttgtttgaggtctttgctctgcaagatggtgaagctatcctccaggtcactgcaaccgttgacaggaagtttaatctcagggagcctaccattcttacttagatcttctagaagcccaggagtgtgagttccactgttctgcaagggcaaagaaggtttcaggtcaagttggtgaagaggagaagctgaaggcagtggcatgttactgggcaaattgttgatggcttccatccccgcagaaatgtcctttcgaattcgtttgctagtcggagaaaaattcccatcacaagcaccattctgctggtctccattaagtggtgatcgagctccttccaacttccttttcacagtctcttgtagctggaaaagaaacaggaaagaggatgactaaacctccaagtcatattttactctttaaggattgagatgtgcattgcgatgaactaacttttaagtggtttacgacacacaggaaagaagtcatacttataatttcaaaatcaggcaacgctgcaattcaaattgtatgggaaaaggttttatctaaaagcagagctcacagggctaagagatagaaaacaaacaaaagattgaagggtgggaaacaaaagaaaagagatagttaataagggcaatactctcagcaaggaagaataatctgttattattttctttctttttttgtttttgagatggagtcttgctctgttgcccaggctggagtgcagtggtgctatcttggttcactgagaccttcacctcccaggttcaagcgattctgctgcctcagcctccagagtagctaggatacaggcacgcgtcaccatgcctggctaatttttgtattttttgtagagatggggtttcaccctgttggctaggctgatctggaactcctggcctcaagtgatcagcctgcctcagccttcctaagtgctgggattacaagtgtgagccaccatgaatgctagacatgagacttggaccaaaatgtaacatacttgaaaacgatgttaatacctatcccaaattcttgccacaacttaaatgagaacatcaaggaattaaatcaacatttaaaaaaaatgctaaaataaaaacttctaagaatatggaatttaacacatgtactaaatagcatagaattgaaagttaatgtttaatgcaatcccaaacttactttaagttcttatgtgacctcacctttcagaaccttttgataggctcactcttttctaaaagcacgtttccaccggtttccacaacatcacactcttctcaatttcctcctttctccctttaccagctctttctcaatctcttatgtagtctttctttttcctaaacgatgggattcttcaatgttttgtcttaagctttttttctccttctgctcactctacattctttcttagacaacttcatcgattacaacagcttcaactatcttctctaggctgacggccccaaaagatgctcatcttcccaggctcacaaaactgggctgggtacattgttttggggtcgtcagcctagagaagatagttgaagcaggctcattggattagtgctcagctccactaaatccaatgttctcctgctggatatttcatggacatctaaaactcaacatgtctcaacactgagcttattatcctttgttacccaaaccagatcctcatcactgttccccatctcagtatctatccatttattcaagtcagatacttgagcatttttcttgaaacctcccacgtcagcaatcaccaagtcctatggattccacctccaaaatataactaatatgccccctcatctccttcctcccttactgttactgtccttggccaggataccattatctcttactagattgttgcagccatcttctaactcgtcttttacgctttgcctccattcatttgctctttagtctatttttttatttactgttttgtgttccctgaatctactccttataatgccacattttccaaaaaaaaaaaaaaaaaatagactgcctttcttgtgtataactctgcaatgatttccactgtctttaggttaaagtccaaatcggggccgggagcggtggctcacgcggtcaggagattgagaccaccctggcaaacacggtgaaaccccatctgtgcttaaaaaaaaaattcaaaaaattagccgggcgtggtggcgggcgcctttagtcccagctacttgagaggctgaggcaggagaatggcatgaacccgggaggtggagcttgcagtgagccgagatcgtgccactgcactccagcctgggtgatagagcgagactccgtctcaaaaaaaaaaaaaaaaaaaagtccaaactgactcttgccaaaaaccacctggctcctgctcatctttccaggctcacctttttgcctctctattcagcatctcctcccctcttctcccttaccctacattttccataaactctcttgagacttatagttccttaaaggtgctgatactccggtttctcttcagagcctagaattctttcacctttacggtgctaagcttccttctgcctctagggcattgtccatgttgttttgttttcttggaacgtcctcctgctccctctcctcttcccctgggtaatagctgcttatttttcaggttagatcttagatttcacttactctaggaaatcttctcttatactcttctccaccctagttatatgttaggtgccttccttgaccaactatactaggttggatgtcctgaaataggtctttccaagcagtctgtacttcactaccatagctttttcacactttggggcagctgcttaagtgtctgtttggtgagttccaagaaggtaggaaccgtggctgacgtgcttactgtgtaagcaccacaggcctgcacccagtcctcaggttcatggcaggggttaataaacaattgcaaatggaatgaatcattctattgtctaattcacagggctaagagaagagtttgaatctgagcaggaggcagccccattgaccataaggaatgcctgattccagcctctacattcctggttttgggagtgatagatctcttaccctaaagagtgttatccacttaactggactcattttaaaagtccagttatgaagtcttgctaactctatggatttatcaattataaacctaactcatctgtgtgctgctttcctttctgtcagaaagggccagtgcatgtggccgtggtgaaagagcttggcatagaatagctactggggagatgcttgctgagtgacagaggggcaactgggaggggttagaagggtttcagtgactttacatagttgcaggcagaagacagaatgacagggtaggagagaaaaggcttagtggtctttccactcgggtactctcttattcttggcaaggtgccgtgtattacagaaccaatgcaagagagggggaggattccctctgcccctgacacctgaacactcacatgtgaaactgccaggcctctagaggagcaccatggataataaaactaatgtgcagatgcggtaaagttcacaaagtgtcattttactgctaggtgctttttcataagtagatgattatatttgaaaagtatggccaggcacagtagctcacgcctgtaatcccagcactttgggaggctgaggtgggcagatcgcgaggtcaagagattgagaccatcctggccaacacggtgaaaccccgtctctactaaaaatacaaaattttgctggggtggtggcacacacctgtatagtcccagctactcaggagactgaggcaggagaatcacttgaacctgggaggcaggggctacagtgagctgagatcgtgccactgcactctagcctgctgacagagcaagactccatcttaaaaaagaaagaaagaaagaaagaaagaaagaaagaaagaaagaaagaaagaaagaaaagtaaacagagtagaaagggcccttgagtaaaagtccagtctaacccttgttcctaaatcttatatttttacaacatcaaacacagcccatagtcatttgatagagaccctcgaactgctgaacacaaggccctaacgggaacatgttagaatttgacggaaaaaaaaatactggctcaactcattgtattacacagaaactgctagaaaatgatattatttattggacaaggcaagataccatggttttgatcagaagtatggaagatacttgaacatagctccaaacatagcagcaagatcaaatatcacagctttaggacttaaaggaaatgaaggttagggcttttggcacctcctggagtgatgttaaccttcaaaacataagcatttgtcttaacaatgaactgactcgattttagaaagtccaagtccatgactctgttccaggtcatgcaatgaatggagcaggacagagaaggaaacgaagctggtccatttgtttctctgtaaaatggtggtggccaagaccatacagtcaggcagttctggctggaaacccaagtttcacctcttacggctgagtgagcagctgggtgaggcagtacagtgagaattagagaaacaggagcactggctctggagttagaaagcttgagttcaaatccaacatcacctacctaggagctaatacatatcaatattgtctggttcttaagaaatgttggctatgataccttccattagaatataagttacatgaaggcaggggttcttccattttgtttccagtagctcagaatagacaataaatacatgttgaataaatgaatcctggaaaacttatttaacctctcctaagccttggtttccttacctgcaaagtgggtcaataatatctagctcacagagttaccgtgagtctgaggttaaatgaaataatgtagggagcacttagcctcacacctgataccagtaaacacccactaagtcttagctttaccattttcaaaattcagtgatacaaatagttacaactgcaactgagaaggaatgcttactggatcttcaaaacacaaataggtagggtatttctgttctctagccagcaaaaccctaatgttttctaagcatctgatgtagcttttttaatatgaacaacaaaaatcaaatttgcaattcaagtccaagtgctaatgcattcatgtcctagattgtagaacagcagaggctagatcgttgaggttcgaatcaaatacattttcagcatgccacctgattggagcctccgagtgttccctttcctccagggcctaaagttctccactgcatgcccctttaacccaaatcttgatttatatatttcatgtatctgcattttggaatataagaaagacattatcgaagatgctgtgctataatttttatgttttgttttgttatgtccaaaatagcagagcaatcttagcatcccttctgtctgcctcatcatcctttgctatatggaaaggtggtctgggagtctaattctctttatgttcctcatgggagacagagggaggcggagagggagacacagagccagctatgtggctgagaaggctgattcacaagctccctgctcagagaacatgggaatgcctggctgcgcacagggaaatgtccctgtgactttcctctcctcaagactcagggcagagtctcatcccaaatagccttatcttaggaagtccctggcccttctgcctcgcaaagcccgaagcctcttagtatgactgcaccctcgtggaagaatcacagaaactctttcctgagcatcagcctccttgctcttgtattactattattacatataaatgttttctcccattaggtgaagctgtggtgccaggagctgaagtatgctgttcatccaatgcctatgacaatatgggctgctatcatgtgtcaattactctgaaggaaacaattcatcttccataatggctccagcgcaagtccctcatttagtgtggcttgatggcttgtttctgtgaaactggtgtgtgtgtgtgtgtgtgtgtgtggtatgtggtgtgtgtgtgtgagagagagagagaaagacagacagtgaaactgagaggcagagagagacagaatggggagtgggagggttgtgcattatgtccaaaccagtagtaataagaatagctgtgcctttggaattacaaagaactttcacacagaatcatattttatcctcaccacaaacctgtggggaaggctatgtgctggctggatggttctacagggaaaggggcagtgttttggagagggtgtggtgggcgagggtgcatgacacccacagcaaggaggagcatggctaagattaccaggcctctgctgacacgggggcccccaatcctagcagattcttgaggtgttccatgggccagagtgtccatgacaaagaggtcttttattccattagacttttagcagtgctggcaagtcagataaactcttactgtcctgtccctgattttgcacgaagttgggcaggatcacagagcttgggaataaagatagtgatgctactattaataatgaagattctaagatggaagacatccaatttctaatgtccaactctagtaaaccaccatattccttctctcctgctcccaatgattctaaaagataggttttattacaatcatcttgcagaggcatcgtgggttaagcagtgtgtctgaaattacagaactcagggggctgggcagaagatggctaaacccagattcaaattcaaactcaggtctgactcctccataagccacactgcaccctcatccaggactggacgaagcacagtcatgccctcatcaaaggcatggggttctgatgccacctgtgatatgctttctcagattgtgctttcggggatcttccttggttccagcatttccccaccaaccatacccaattaaacctcaagaactatccattctatgaattttagtctcatcttccgcccacaatgccactaccccattcagagtctcaatatgtctctcatgaatttctgtagcagctcctgaccagcctcagtctcgccacctccaacccattctctgcatcgtggctgtggttttctccatacattgtgaatctgatcatgcccgttcttcactttaagcttttctaaagctgtccaccatcttcagcatcattcaggtctggcacacaggccttctgactggatcctcatcccagctaaactctccaggcttagccattacctctcatcttccccgacttaccccgcaaccccactcaactccaaactttcagctatgcttaattatttgcagttcccaggacataccacatttgttttctctctttctgagcctttgcatattttacacttaaccaacttcttcacctgaccaattctatgtgtcctttacaattcagtttagacattacctactccacagtctctcttgacagccatttcctacaactcctgatgttggttaagagaccctccatgacattctaattcatatcacactataactattttccttcatggatgaatgaatgaatgctaaaaagagctctcaaataaccacaatgagttagtgtaattgatccccaaagcaggctcttgaaaatgttggactgcatagtgttctcagaataaacgtataatttctgttggttagtttaaaatactgaaaatggactatctccttaatatttttgaggactctaagggtccagggaatccctgatgagaaccactagagaacatacgaagtgatttgtggaaaagaaaactgaaactgaaatccagagactttaagcgacattaccatggtcacatgttttcacatgaatgtaaaccccaaacgctgcttattttcagacttgaattttaaatttccatacaaaggcttcaagtggttctcacccactatagcagcctcttcaaccaaaagtgtgagtgagcttccttcaccagctggtagagacacaagtctttcccaaggcttgaagataagagagtcttagcttgcagatgctataactagtttagaggctcaaagagaacattttggtcattttgatctgttctggtcaaactagaagatgattcactggaatcaattatcacatgcttattctctttccattctaccagcaggtaataagcctatgaacacatggatgaatttgacctgcttatgtaatgaatgacccagaatactcatgtgctagatattttaatgagtagaataggaagagtgcgcaaaacatttccagaactgtcttctagatttaagtgcccttagaaaggatcttgagcgttatttagaggtttgattttctttagtaattttccaactttaatgtaactagtgacctgagaacctgttaaaaatgcagatttcttgatcccaccttcatagtttctaattaagtagcccagattgggacacaaggtgggggcacaggtatctaaagaaactgaataaaaacctgattcttccggggctgttggcctaggattccccaggttttagaaattctgatctagattaataattctgttggattctgacactgtgaggttggtggtgtgatttttttaagtatgcatacacatacaaatccaatgtcactacaaaatgttcctgagttgattggtgatactctgggggctctcataaacagaactaagaaacagtgctctagatggggctttttgaaaccttagaggattctgaattctgcagaagcttgctggatttctagaatatttttcataaaaatgtgtatttttaaaaacattttaggtttctctgagcacagtaatatccctgaccatttccccctccacattatatatttcccttcactttcattcagtgaactgaggggtgctctgtgtctgcgtgtcgggctctgcgccaggtgccaaaggctcaactcactccccagagcaaagtctatgccaaaaagtgaccacatgccacacatatgttgaaaaaagttggatacatttgttttagagagatctatgtgcagggcagactaacaggaaaagaaaaagaaaaatcttattacaactcccgaagcctcccttggtaatcttatagactcctaacattacttagacagaaaacaactttactctctatgagtaaatgaatttgaattttaaaattatgtatataatctgtatatatcacatataatattgccataagagccaagtgtttaaaacctctgctttcgaccatcccagaatgcggcttccctgtacctgttcagtgggaaatgctggatctctggagggggtgtcagccgtaagcagttaaaaatctccattctgaaatcctccaggaagaaaaggatcctctttaaaggggcctcaccctcttagtgggcatctgaaataatagctgcagagtcccaagggactacgggggcaccgcggagcccccagcccaggggacagaaccactcaaaacattttaaggtactttgaggttatttttagaaatgaccatgatcttttttctttctgctatggttcacatttaaaactctattcccaaaaagtcttggaagtacataaggctgatggtgcctcttttcaatgtttggaacatgagcacccatccaattccagctgtaagtgctaaagcaacatcctgatttaatgactctttaaaaatattttaaatcttttttgggggtgtggctgaatctttaggtatgtttttatcctttaattatgcttaaacatgtaataagtaccaactgaatgcacaacaacatattgggaatggatcgtaaaacatcaggagcagtggcagctgaagtcctccacatttagaaactctaagttccaagatcccctcaaatctccaaatttccaaatacataaatgtttttacaggctcctggctttctcccagtggaatgaataaattatattttcatcacaagtcacaggaatcctgtgtagtctctgtatccgaagttataaagtttttcacaaactctatacgtgcagtttaaactggtgttaacaaaattatcaactactcattaaaagcaagactgttatctttgcaaatgctaaggccatatgattttcaaatctcacgtagttttcagtagaatgctctaaacttctaagtttttatcacagaagttgactcactgcttactaaatgtttcaatatattattgtcatacaatattctaattgactgagagctaaccagccaggcattgagctaagtgctttacatatcttacctcgattaaccctcacaataacttaaaggacaggaatgggttcagagaggacaggtagtttgtcctagggcacacagcacagccctactcagttatgcctgcctctcaaatctatgctctcacctactctgctattttgcatctgatgacttctgtcccaatcaaactgcagcaaacctgcttagaaattctgggaaagtgttttagacacctgtgtcatgacgctctaaaggggatgtgttcatgtctttgagtcagatctggctgattcacagaaaagccttgtgcttcctctacaaggaaagatgtcactctgcaaatttagcatgtgtttgagaagtgatgatggctgcagccctgaaaacttcagaagagagcaaatgtgtgcatcccagcggtagcttccttcactcagtagctttctgtaggaaaaagctccactgagactggtagttgccatcagcattccacaatctgaaccctgtactgctctgttgtttcatatacataaatacacacacatataacattacatttatttttaaggacaagaaacaatatccttaggaatatctcctgataatctcccactagaagtcatgaatacattttctattcaaacatgcttgtatacatgaccttgccttacaatctgaaattcctaatgggattttatttagagctgtaaagaaatgccggtaaaggaggttggtgaggaagaagggaaggctttcctccccataagggaggaggatggcaaatgaaaagatcagatcttatctgcatcattcacagctggagacttacaccaacaacacagaccaaagaataggcatgttagaactaagcgtgaggtttcgatttgtttattttctggaaggagggaggcgggaaggagcaatatttcagggaggctgagtatttttctctcccttggggaggattcaacaatctttttatttcattgtttacttaaaatgtcctttcttttcaataaggaattctcatttttgttttcagcccttccaaaagactgttttcctcaacagcactgaagtcgtgcaccagcctagcaggatgcgaacagccagggtgcccagacctgagactgcttttgaataaaatcccatcacatgtttatctccctttggaaaacaaaagtattgaaataagatctcttactcgataaaaagcctcgtgtttccctcaaagaggccagacactgctctttcttgtgagatgcagtttgcataaagcagtactcccaggcagctaagagctaccctcctggaagagaatttccagtttctctcattctctccttctctccttcccctggacacacacgcaggcgcgcacgcacacgcacacacacgcacacacacacgcacacacacacacacgtctcaatgagcgagcaaacaggacataattcttatttctagacagcatctgactcccaggcctccatcctccatttcacaacagatttttactccaaacctgagggggcttagggacttgccttcattgaccaattacggaactgtcattatttgcatgtcttttgagtaactttgttaataaacagaaaccaaggcaggaggagagaatttttctctccgggatgaatcccccatggatgaagaagatacccacagacagacaggcacgttctcacatacaggcaaacatggaagtcatttgagccgctctgaaaattttcagccaggcggaggtacacaccacacattcagcccgtaaacagcagagctctggagcctggcggcagagctttcatctgtggggcaaagcggctcggcttcatcccaccagctgaaattcatttttcaaaagaaattagaccaaggtactgttgttatagcaacagtcagagtcatttacacagcctcttccgcacaacctcactgacttctgtgggcagcgatttcaattatgtacagggagtgaccaaggctgagcccgggtggaccctttagtgcccctttaagacgtggcagcctaaaacctctgtgtccaatctgaagctaaaagacaacaagacttcatcgtgatccacagacctcttccagtcctgaaagtccaatgagcagtgaagacaggaagaaaaccttccgatccaatgttttcatctcctgggtaggaactggacatgtgaccattgaatttcctgggttaaccaagtactggccatttcagaacaggaatttccagtgaagacagtaatgttcacaatgaattctttaaaaaatttttatttttagaaatggcgtcttgttctgtcacccaggccttggctcaagcgatcctcccacctaagcctctcaaagtgctgagattagagatttaaaccactgtgtccagcttcagcaatgaattctgcagtaatttcataacatcagtcttccaggactttattcttggggctgtagaattcccaatataatagcctactccaacctctgaaaacaacaaactacaaaatgctcctttcttgacaaaaatgtacccttattacagaatctttacggctaataaccttctggacggcaatgtagcagtctacgtccagtctagggatacacaaaggtggtaaatacctatgaagccagtgctcatgactaatgatcagagactgaattctgtgtccacttcatacgttgaagtcctaactcccagtatctcagaatgtgactacatttagagcagagtctttacagaggttaagttaaaatgaggtgattagagtgggcgccaatgtgatatgactggtgttcttataagaagataaccatctaccagcaaaggggagatgccaatcttagtctgtttgtgctgctataacaaaatacctgagactgggtaatttatacataaatgtatttgttcacagttccagaggctggaaagtccaagatcaaggcactcacaatgtcagtgttggtgaacggccattactcattagacggcaccatctaggtatcctcacatggcagaagggacagaaaggcaaaagggaacactgtgtcctcccatggtgaaaacacagaagagcaaagggaaaggcctaagctagttccttccagccctttgggaggcaataatccattcatgggggtgatgtcatcatgacttcatcacttccctaaaggccccatcctcttactaccacagcagagattatgtttcaacacatgaattctggaggactaacattcagaccattgcaaggcctcagaagaaaccatcccatcaccttgactttggacttctagcctccttatgagggaataaattgctcttgttgaagccacccagtgtgtggtactggcaactctagcaaactaatgaaactgataatttggttcgaacatgtctctgtcctctcagtgtcttagatgggtttggctctcaattgatattttaaaggaatattttgcacaaatttgctcatgcttagatttaactaactgaacatctactgggtgctgggttctgtatcagcaagtagggacacgctactgaacaaaagccaatctctttccttcagaatggagaggaaagaaatgcagatgggcaaagacagtgtcgtttgcagtaggcataggcgaccacgctgtgggagcacaaagcaccacatgccactcagtccagatgaagtaaggcttcctgctggggctgacacacaacccgagaacttaagcattcatagtgaggtgaagacagcccaggcagagagagcaccaccttgggtcagaggagaaggaagcatggttttaagtgaaaacttgcttaatgacaaagattcattctaagaaatgtgttaagtgatttcatcattgtgtgaacatcatattcacacaagcctaatatcctattacacacctggggtctattgctgctaggctacaaacctgtacagcatgttactgtactgaatactataggcaactgtaacacaatggtaattggttgtgtatctaaccatatctaaacacagaaaaggtacagtaaaaacatgaaaaatgtggcgttacaatcttgtggaaccaccatcatatatgtggcctgtcgttgactgaaatgtcattatgtagcacctgactgtggttgtatctggcttgagccagagtgtagggcagaagtgtggagaaacaagcttgcagaagaaagagctgtatagacctgtgtaccatggtaagaagcttggactttatccagaaggtttcaggagacactggaggaaaaatggtcacttctagtgctaacttctgattttgtaatgataaagatcagttatagggctgggcgcagtggctcacgcctataatcccagcactttgggaggctgaagtgggtggatcatgaggtcaggagatcgagaccatcctggctaacacggtgaaacctgtctctactaaaaatacaaaaaaattagctgggtgtggtggtgggcatctgtagtcccagctactcaggaggctgaagcagaagaatggcatgaacccgggaggcagagcttgctgtgagccgagatcatgccattgcactccagcccgggcggcagagcaagactctgtctcaaaaaaaaaaaaaaaaatcagttaaatcagttatagctggttacaaaaggtaaaatattcgaagtgatctgtattagttttctagggctgccataacaaaataccacagactgggtggctcaaacaacatacattaattttcttacagttctggaggctggaagtccaagatcaaggtatctgcagggttggtttctcctgtgcctctcttcttggcttacaggcagccagtttctcactgtgtccttgaacagtcttccctctgtcagcactcattcctggcatcttcctgtggtccaaatttcctcttcttatatagataatagtcatcttcagttagggcctaccctaatgccctcattttaacttaaaatgaccctatctccaaatactgtcacattttgagaaactggggagtaggacttcagcaaatgaatctgagaggacacaactcagcccattacatgatccaatatcattcttgcatggctggttaagcaaacagacaatgccatccttaacgtacatatcaatacagctcagacttggtcttgaggcaagtaactcaacaactgctattggttcagagtttaacaatatgtatactcctatttttattaatgtatttacttattttgagatggggggcgggtctcactatgttgcccaggttggcctcaaacttcctggctcaagtgatccttctgcctcagcttcttaagtagctaagtagctgagactatgggtgcataccacctgcccagcatgtatatattttcaaaagtgtttgtctcccaaattcagaagaaacttcacattcactccttaactattagcaaagaagtatagtcagagatgactctaagcaaaacctcagaggaggcaaaagttagcctgccatgactttaggaggctctgaatagtaagtgtttgttccctgcagcttagtaaatgtcactttacgatgattttccataatccacttgactgcagagagatgtacagtgggaaaatcgaggcatagagaccagggccataatgtaactcagaggaagaacaaggaatgatggttaggattcttgcgccagcccagtgcctcatgcgataaatcactttgcctaaaacaggttcagagtttgtcaactttctgttcaaattgtggtgcattgtaaacgtactgtaaaactgtagagtaaaaagtatgtatttcaatggttttatctttcttacctagccatccacatattatttatgcagtttccattataatgctacagttaagtttgcataatattttctgtaactacctacttttgcatggttatagctctctaaaactcccctgggacagagttttttcaccttggtctcagttcagaagcaatttttttttttgtaataacaattgatgactttagagatatttttgaagtcatgtgaatgtgaaagaaaggaagatttttactgcattgaatattttgttaccttttgtctaaacaccacacatcaaaaagagctgaacagaaaggtatcaagcaaggcagtgtaatagatttcactgaagactgaccacactgccagatttgactacatgaggtttgcattcacatgcttatcagtatttaaaaataccctgagtgtacacaacagaaaatgtcaggaacttgaaaagcaaaaatatgcatgtggtgttttccagatttcagcaaagcacagtaactaaagaaacttaattatgtgatcaggcagcagttacttaacctttccagacctctgtttcctcaattataaaatgagagggttggactacatgatctccaaggtttgttccagctctaagagtccctatttggactctggatacaaatcaataacttactttcaaagtcaccctggaaggcactcttaactctgaacttggcaggtagttaccaaataagatccttattttacatcagagaacaagaattcattacattcttctgccaaggtttcttgactttggtaaacatgaaagaaaaattacacttgaatcctaatcacaattatcttttataaaaatgccagaaaaccaagtgtttaaattacatgactcattcaaaagaatttgtgactttttgatggcccattgggtgtcaggtgttgagctgagtgcagaggatgcaaaagatgcacaagtctcctgatttcaaaggaatttgtaggctgttgcatgttttaattttcctcctgtctattggaaaatgctccccttcatgcataacacttgtctgacacagacaacaatgttgtatcccattctggcaaccacaacttggctaacttatacaactgtgcactattcttcttcaccgtgaatgattttgagtaaacggccttaagtgacatcaagggtctgaacgtgtcagtttgggtaactagatactggaccaggttacatatagaagccgtctaccttttctgggtgtccacattgcatgtattacctagaataagcagatggatggtggacctattgtaagcttagagtgaggggctctgggacctagaatcacgtctctcatggccaagctgtatcctctctggaactcagttaactatgctctgctgccatttttgccctggacaaaatctctgaagtcccctatagatctaacagcccagaattgtataatctgtctaggtttacttgtgtatagttggaagatgaacaaactgacattttagatttcctttcaactttatgtaaaccatatgtttacatattctcttctaaaatatgtaactaattcctgattttgaaaatagtaagtttgtctatcactatttctgtatactgtgtagtaaaacctgattaatccaattcctgctaattttgcatttagctgtaacttggctaagggccaattgaatatttatccttatgtacaataaaagcttactgtgtaaaagaataggtataataaaggttataaggggaatgtttaacctacttaatatagaaatgagtctcaaaaactcaagaactcaaatttaaataagcaattgatacatgtattatgaattcttctcagatatttaagtagttccccaaggatgtttatttactaacagctcactagtctagtttgaattactgttgttacttttaaatatatcacaagcagtatatatttactaccatacttcaattcacattcttctcaattcaggcagctgtttgcccaaattagtttaaattagggaaagtctattgtattcataaacttcatgtaaacagcagaaatgatgactataaaatttgtcttaggtttgttggaactctgagcttaacttctatctgagattcgcagagaatgaacatggaatgattaatggccattactgatttcttgcagctgtaacttaacagaatatgtatactctaatacagtacccatggtaattatctcattactatgaagtgtcacagaaatacattatgcgaagtacgccctgaatcacatttagcaatttctttttatgttttaaacctgcaagcttagtgttgtctagtagttagaggtttgcgtggaggtctggggcttagcataggactcctgcactcgaactggagttccttggcagaagcagaaccagtttcgtgactctgatcactctgttaaacttttctgtacctcaattcctaatttgaaaataggcatattcacatctgacccctactatacctcatggaaaggattagtcagattatgtctataaaacagttggccaccatgaggaaaagcattaaggaaattactcagccctctgcagtggtgacttctctaactgcatgaatatttaacgaacaggtatacataatacttgacacgtctatggagcttttgatgcaagtatctcaacatcgctgaaagaaatacataccaacaattatcaaagacctgggaagcatcaactcaccactcagagagggcagacatagaacagcttagtttttaacatcatactgttcaagaccagtggtatagccaaatacagttatcccacaaacccaaagataaggccttaaaccaggtgcggtggcccgcacctgtaatcccagcacttgaggaggccgcggtaggtggaggtcaggggttcaagaccagcctggccaatatggtgaaaccccatttctactaaaaatacaaaaattagctgggcatggtggtatgtgcctataatcccagctactcaggaggctgaggcaggagaatcgcttgaacctgggaagtggaggttgtggtgagccgagatcaccccactgcattccagcctgggccacagagtgcgatgccgtctcaaaaaaaaaaaaaaaaaaaaaagataaggccgtagaaatgaggcatccagccatacacatgagtctgcctgaacaatatataagcacagaagttccctaagaaagtaaatgcatagttggaaatgagtcctgttaattaaatgagaggagtcagcaaagagataaaaaaaaacagtattggtgagagatcaacataaaacatcatcaagaaagtaggacaaaacaaagaagaataatttgtggtcaaatttgtagtgtcagttgcagctctgaaatgagaactaagagaccactaggttagtaaccaagtaattcactgagaatctgagcgagggttcctctatgacactcagcagcctcaacatcacctgggaacttgttagaaatccaaattatcggccagtccccaggctttctgaatcagaaactctgagggtggggcccagcacactgtggtttaataaaccctccagatgactgtgatgagtagaatccttgcacaagaactgtgttgtttgtccaacattgctgagaggatgcactgtgcgatacttcagtcactagctgcatgtggctactgaatacttgatatgtggctagtgctactgaggtactggcttttaaattaaattcaaatttatttaaatactgaggtatttatttttaaataaattcaaagtagctacatgcaactagtggctattatattggacagcacagttgtagaatagtactgtaaatgaatgccagtttttggtcagggaactgaggcaaatggagatattaggaacaagaatggagatattaggtgtgactcttctatataagaaatcttgttgcaagaaggaaaaaaggcatcataggttgtatgtcatgaggtgaagttaaaggctttttcaggagaagtaagttctgagtgggtgtgaaggagaagggaagtcaggaagcaggacctattgacactaaggaaggaaggacaagtgaaaatgtgtgttggaaagtccgagaagtataatacaggcatacagatatatataattgtggttaaaatattagtaaaagaaaatttaccatcttagccatttctaagtgtacagttcggtggcattaagtacattcacactgttgtacaaccatctctccaccatccacctccagaaatcttcatcttgcaatactgaaactctgtgttcatgaaacaactcctcatcctctccattccccggactctggcaaccaccactctactttctgtctctatgaatttaactactctacgtacctcacataagtggaatcatacgatatttatctcttaatgactggaatatttcatttagcatcatgtcctcaagttttgcctgcattgcagcatgtcagaatttccttttttttttttgcgatggagtcttgctctgttgcccaggctgcagtgcagtggcgtaatctcagctcattgcaacctccgcctcccaggttcaagcaattctcctgcctcagcctcctgagtggctgggactacaggcgcacaccaccacacccagctaattttttgtattttagtagagacaggatttcactgtgttgcccaggctggttgtgaactcctgagctcaggcaatctgcccacttcggtctcccaaagtgctggaattacaggcgtgagccactgcgcccagcccagaatttcctttttaaggcggaaaaatatttcatggtatattgctatggtctaaatggttgtctccttgctgaaattcacatgttgaaatcctaacccccaaggtgagggtattaatattaggtaggaggtgcagcctttggaaggtgattaagtcatggcagtggatccttcatgaaaggtagtgcccttataagaggccccagagatccccctcactctttccatcatgtgaagacatcggaagaagacagttgtctatgatccaggaagcaggccctctccagacaagaatgtgctggcaccttgatcttggatttcccagcccccagaactgtaagaaataagtttctgttatttataagccatgtagtatttggtattctgttacagcagcctggaaagactaaaacatatgtacataccacacttggtttatccattcattcattgcctccacattttggctattgtgaataatgctagtaatgcatgtgggtatacaaatatctcttgtagaccctgtttcagttctggtggctaaatatccagaagcagaatattggatcttatggtaattctgtttttaattttttttgagaaactgacatactgttttccatagtggctgcatcattttacattcccatagaggtgcttgtttttgagacaatgaggaagggcatatcaatgccatcagaagagtgattaaaaaacaaatgtgggggagagatttgttgagatggaatggggagaggtggagacaaagaagtttggctctaatagtctttcttttctcaatgaccttgacacaaggttatcatctccaaggaagaacactgctaaggaggaaaaaataaaggttgaggagagaagtaaatgaaggtttcgtacagctagtccgttacaggaaaacaggtaacattctgagctctgaagcagaagtctaggcactgttgtgggttaaattgcgtcctccccagcaaaatgatatattgaagtcctaaacttcagtacctcagaatgtgacttcatttggaaataggatctttgcagatgaaattcattaagatgaggtcatactggagtagaacaggcaaaacccaacacagctggtatcatcttataagacgacagccatgtgaaaacacgaagacatacagggagagtgccgtttgacggcggaggcagagactggagttacgcagctgcaagctaaggaatgccaaagactgctgacaaacttctggaaaccaagaagagttaaggaaggattctctgcagagtctcagaggaagcacggccctgctcaccctgctgacaccttgatttttaccttcgagcatccaggactgtgagacaatccatttctagtgtattaagccacctagtctgtggtatttgttatggcagccctaggaactaatatagccacagggcatgaatctgcagtaggacaaggtcatcctatgccaaggccaaaatgagtatttccaaattactgtgcatcccacctgtgagcaatatgcttcctgacacacagtgataatgtaggtaataagtcaatgtaatacatattttgaatcacagtccttactaaagggttttctttctgtcttttccaggcataaatgaggcatgcatatgaacacactaaattgtatgcttctaagaaccaagaggggagaaaaaaaatctcagtatcctggggcagaaatatgtggagtagatgtgtacaagtaatgccttagtgctgtcatcatctggaagttctggattttatttcacctaatttgtcccctaatttttttttatggattataatcctaagtatggctcttacttcacctgtaaaagtcaaagacatatctaatttttaaaatttctaaatctgtctgctttttcctttttctgactttggtctttgtcctaagtgccaatgatttttggataaaaaatccaattattttcctacttttacacttgagtttcatgggggaaaagtcagcattaatggtctggtgatgagtgcgaacagatgaagccatctaagaaaaagctgtcggttatgtactcctgggtgactctctcagaagcagacgttcaatggctgtgagagcaaaagaaccaaggggctgtgggggtgtcagcgctgcactgatttcagtgcaagacaagggtttaggtcccgcataacatcttaacagaagactacggcgggcgccccttggaagggtagctcagctattgctgatatggaagcagtgtggattatttggttaggcagaataaccttgaacatctgccaagtcaaaacacaagtcataaaaacaaacacaaagctttccctggctgcccacttgctctctgcctttaaaatatttcttgcttttgttaaaattcaccttcatcctagtaaaagaggaggaaaagagttgtgaactgcaattgtaaagaaaaaacatccagtgataactacattaaaattttttttttacaagaaagtatccagtaacaaattgtttccctcctcccttccttccacagctcctcgtatatatatttttaaaagcatttagactttggctttttatgaaaggcatacagtaaaagtatcacagttccaaaattccaaagcaatttcacaatcataatgaaatgagggaggaaatggttttgtgaaggtcttaaaaacaatcaccccacgttgctatgtgaagcatctttatacattataaagggctcggcaaaaattagttcattcattcaacaggcactcatcgagcatcatttatacactaggacctatgtaagaagctagggatgaataagacacagtctgcctggtagagctcacaacagagggagacagttattattattattgattataatgtggctaggcttctcctgccctattcctacctccagcccccaggaaccttgattttaattcacaaagcgccatattgtggggaggaaaaaaaaagaaaatgaccacagtaaatcctgtaaaggtggcaggtctctccagaaatagagctagactgtgagcttagacctcctttaaactaatggcaaggaaagaaaagaacacagcaacatgcctaacccagatgtaccaaacccgaccacaacaaacagctagaactaaatgagagaaattcaacgttaattgggagagaaaatgatggagaggacaaaaatcaattaaaaaggaagatgaaaccaactggaataaagttaaacacatctttccctccttgtctttttccccagaattgccccagagtgtcacctgaagaaagacgttaccttcagctccactggagactttgaggtttcacagacaaagggagccaagtctggagtggataacccaatttccacatgttttggttttaattcagatgagccaacttgaatatcaaaagtcaggtttttttttctctgatgtgattttatgcctgcttaaaaccagtggctaaggagaaagggcatatacaatgaatctaaaatcattcaattaccttaagtcaaccgggaggcttatatttactgaaaataggcattcaactcccatattacaaagacatgcaaatgactcccatgttgcaaaatattctggatagtttattactgctctctgttgttggaggagcaaggaaaaaggcttgagaggctgatcaggaaaatactacatttgtcagttggcaacagcagcaggttaacacagcctcttgaattaacagctcacaggaagagaaaaaaaccaactcctctttggaagcagattcatgctgcaaaattatccaagttaatttccttcagttaattatgtcagtttccttattagcaaagggagatgaccaagtctagtctctatctaacgactcagaatgatgaggttagctggccccatctctatgtttaaacctaacgttcagacagagcctcatagaacctcatgggcagaacttgccctaaccagtatttagttctgctcttagtactgtttaaccaaggattctctcagaaatgtccgtgtaggctacgattgagatctactaatggctaagttaccacactgcttcatctcagaaacctgtgtgtatgaatccaaggtacgaaagcatccagtatcccttgtaagtctggtggctaagcagcattggcgggggggcggggatcctctgaacccactataacatggcaccttatatggagtgggggttcacagtgaacatgccctgacctcctcgttatcttaagcaaaattttggggtgatgaggggtagggatggggacaggaattcctccggaatcactctggaatccgggtccaagccagagtaaccctgctaacacagacgaaccaaatttactgctactcagactggccccaaccatttatgcactcctcaacgttatcagcaaacagcaagcttttcttgtgtgtgcatccattaaataccaggcaaattcaagatcttttctcttaattcccacatcaaccacgcaaggtaggttaataaacatcatttacacaaatgaggaaactggggctcagggagattaaacaaattgcccaaggtcacacagctagtgtgagatttgaattccaaagcctgtgcttctctgttacaagcctcaccacttgtgaataaaatgtgtttctcatttccaaactattccacagcctggctcctgagataggaaaaaaaggaaggcatcctcagaactgctttctcccctccatgattggctggcatataagaagttactctctgaaactggatctcctatgagggctgttgttctttcagccgttctcagaacatttctgctactgagttactgagttataactatacattggccactaacccaatgccagcctgatcctgaagagaatggtgttggtgacagcaggccacctgtgtggggtcatggtaatggctaatcctactggtgaccactttccagggatatcactactgaagcgccgatataaggacacatttcccaggaaaccaatcctgctcgtaagcatgtatgctgtgctccaggtggccatggcctcagcacttaaaagtcgagagggccaccaaccatggttctattgcaagagttgtaaaaatttgcactcggcagccactgccttcacccaggtctttctatttttctttattaatagctttacgtttcctcttattcataagataaggctaatattgcctagttcagaaaagggttgtaggggttaaataaggtacataagcaaatgtatccaccaatggtacttgaagactttttgtaactttcctctcccattaacaattttatagtgacttgcagggattttcaagtgggcgttctttaacctcccgtacaataccataataaaatatagagataatgcagatatacatttcttagatgacagaacaagggttctgtgacattgataatgctgaatttttaaactggaggtttacataaaaatggatttccagagttctgagaatgctagaaaactgtatgcagaattttgtgggtatgtgtctttttcaggaaagaaggtccaaagcttttctcagattctcagtgcggcccatgactctccaaaagttcaagaaccactctcctgtaggttagcagtagcaagatttgctgggcctagctgtaaagtcttgcatttaaggcaggaaaacctgtctcataagcagttttgttttccttgaagtttgaagccgtgtgctcttgaaattctaggttgcattaaatgtatgtatgttctctgagtccagggagacatagttatgctctgaactgatgccatccaataaggttggcttccattctgaaatgatcactctcatcaggtggcagggcagcaagagggtagtaccaggggaaagaaggccccagaaaccatgtcaagtgaaaaggaggcgaggaagctgaggatattttgctagagaaagaggagagttgaggagggggaatgccacagctcctcttgaaaaggtaatggtttgctatgtaggaagagaattagatttgatctatgtagctccagaacatggaactaagatcaatggatgcaagtaatggggagaaagaattcagcctctatataaggagaaacttttaaaaaacgattagagagattcaaaatagaaagggctgccttgtgaggctaatgagcttcctgtcccttgaagttttcataccaaggctgcatgttcatctgtcagggatttgcaaaggggattctttattgggtggaaagtaggagaaaatgacctctatgattccttctaattccatgatccgtctattaaggttttatatctcttattaaaatttatagtcaaagacccatagacatcttcctttactttacagaatagatacttgaggcgagtccctttataaagggaataatcagactttctctttaagttttgatttttatgtattttgttttctcagaatgggtcacacctatgttcggacgctgtgtctgtgtggccagcacacacaccttccatctgtcaccttttctgagtctcccctgcctgctccctgcctggactcttgcgctattgttccactagccgtttttcccatcttaccctttccagtctactctccaccagcatccagagtcactgttgaaaaacattcttcagagtatgtctttctgcctcaaatccttatatagactcccatttctctgaaagtcaaacttgcctaagaggcgctggatggtctggtgtctcccagctccttcatacccttctccccttcaccaccacactccaggtggccgcgctggcctctccgagggctcttcccctcctctgcatctgcaccggtgcttctctccacgtggaacacgcttatcccagctccttgctgggcttattgtcatccttcagatttcagctcacatctctccccagaaaggctgttctgaccaccctggctcagtcagctgcacctcccacttgtactttatcgtgtccttctgttttgtctttttcacaccactgatcacaatttataatcattttgtttcttcctttttccttggtattgtcttctcccatttgagtgtaagctccttgcagacaagcacctagtctgtgttgctcactaatgtgtctgtctccagtgtctagcagagataagcgcacgactggtggtcagtacgtatctttggaatgaaagaataagtgattacatgaacatttctgtccggcatagtaggtgggctctggagctgagtgtgacctcactccttagaatgtaaacaggaatcgtttcttaatgctccctctgtttacctagcagagtaccgcgcatacctcaggcctgcaagagaaatttggattgacccccaagaagcacacaaatgtaatttaaagccaaatattagagaaaaaacatctttttcactggagaaagacattatccatgtctcttagtttcctatatgcacagtggggttaaatcctaaagagaaatactacaggtccccaaatctaggatagtgtgtcttttttcctctgagggctctcagaaaaaatattctggcagtgaggaacaagagatgctggaatgagttactgaggaggtggtagaatctccttttctggagatctttaaaaatagaacagccatctgggatgatttagatatggtcttcattgaagaagggggaggaagggggatgaaggatctctctaagtcccatctcatccttgattttctgatatttcactttaaagttttattcatggcaaatgccttaaaggagctaggattcactttttctttttatctcaaagttaaatcccattttattttgaactgtaattctgctgaatcactatccttctctcttcaaatgggcaatttggatgtcataacttttttatgtagaaagtttggatggaacttaactttccttctttctttcttagaaaggaaagcaaagagatgtaagatggacaagttcagaggttgggaatgacaggcagaagtgagaatctctgcgtggattctgctcctgccactgagaaggactgagggaggcgaacagcacatggaaaaacaggccaagacttcatggaatgtggaacatcccacaacagggacctggtgcagctgaacacaggagttcagccctagaggtctagtttactatttataactattgagtcttcatttttgtttgttcatttgttttcatgggattaagcttggtaaagtcatgtaaacgacaagaggcagacttttcttctatttggctaggaaattacagcagttcagctgtttcctctctttgttcttatgactcttgcttgatttattaaagttgcagagtcaaaagaataatagattttaatacacatcaggctgaatcttactatttttgctatagaggccatgctgtaaaaaagccttgttaaatttgtttctcagcactatttgtatgccataactgtttttctaacctaaataaacttggttgcgattatcaaatacattttatttttaaatgttcattacaagcactgttgttcataacaaactaatgactaatgactctagttattttttttccaaagggaacacagatttcaatgacattcactttttttgcctttctgtaagttaatgaataatccatattttaatggaatattgtgttaagtcagaacaaagtgtgaccagaaaggtcttcacaaaacatgcttgcaaactgtggccctgtcactttatatgatattaaccaaggacacgtgcttcttcatttgcttactgagcccaggactggctgtgtatccacaccagcaacacttctgtggatgtgtgcaggtgtgtctgtgcactggtgctagaagtggaagccaaatgccaaaatccacagaaagaacattctaaggtagaaataagaactccccaaaacaaaaaggcagaaaaagaatattctcaaagaactttactatgaattacattaaggggcctttataatacaacatgcacacactgttgtgttttggtacatcctgttacataactgttcactaaagtggccatcaaccacctttcattaatggagggcacacagttgtccagggcagacggagacatctgatccttaatagagcagaattaagtgtctgcagggaggctgtaatttctacagagcatggctccaacttttcctcccaggaggccccagtcccggcactggagtccgcaggatgactgtctggggtgagtgacctgcaggagcccagctggggccagggctgcacacagggggatttaatctctgggataaagactggtttgggctcagctaggtcagatctggagaataggcccttgcacaccaccttctctctgctttagaatcttccctttgctccactcacaccaacatgggcaggtgggatcagctgaaaacgcagtctcaccaaatcccactggctgaatcctgctttcttctgctctctttcctcctcatttttccccctctcctgtccaccttacttgctctggtacactccaggagcctccaggagccctggacaaactcagtgggccagtggcacattctctgggaaatcgaggtctgaatctggagctagcctatctactgcccctgacacgaactcccaactcacatccagactccaagtggcttgtgcttaacttccacgattttcctttccagcttctggtcagtttccttccctctctatggctggctggcacacgtgaaatctggtcactttgttatttacaaactatagttttcagtctcataccctctcctgagctgctcactatcgctcctgtggggttttctcacagccttctttcacaaattcaacaccaccattccctcagtgcaaaacaagcatagagagcttgctggggcttgcagaaagagggaggggggctgctgcttcccaaagcccttcctctggcactgccaacgttaacgccgatctgtggggagactgcaattctaacataatgagatattaatgagctctgcacatgtccctagccacaacacttctctctccccctcaccacaaacccccttcagcaaatctaaagagaatcagctcctcctctgacactacaattcctccactttccctggagcctgccctctcccactgcagcacctgggttgcccgctcaccttaagctgccagcactacagagcaccaaatgggctggcactgccttgtttcctggcctaacggatgcttgtttaaacactggagctgtttgcattgctgcggctcactgcatgttaaacacagtcctctgaaaccctatgccaatccaataaaggtatcagcagttcagtgtggggaggcaattactatatggtcccaagtgtgccttctaagctctaggaaggaaaatttgatcgaacaactaaaaggaaaatctgattcggctcagcatcacgtggaggacacaaggcttaactgcagccaggtctgtggagggcagagggaaatcaatccaggagctagggagagcaagtgcacattgttaagagggctttaagccagcctgttagtaatactgtctcctgcgtttggaaagacacccgcctgtcctcccccttctgctcccttcagcttgcttgctttttaattccaaggggtatacttatttatttgctaatgacaaactaccatccttcttaacaccctccaccttctcactcacctttaattccttaagcactcatatttaaaaaatggcttttcttgtgcaagatcattaccatatcaaaggcgatggagagagacagcaaaaatgatagagggataacatacaggcagagagaagaaggcaggcctgcttcagagagaacggtgggtccctaacctcaagctaatgataccagtcgataatgcaatggattggttttctgccttagctaagtctgaaaaatcaggggaattagacatacgatttacatttatttctcacccaagaagcagaagttagaaaagtgaatcattccctctgtttttaagttctggatatgaaaagatatggagcctagggtttcttttacttctccttctttttcatttcaaaatcagctccaaaatggcccatctttcccaaggaagagtgagaaagcagcaatgtatgtgtctggcaacacagagaaatgctacccacaatgctcacgtggtgccatccattcaccaggaattttgccaaatccttgtctatttcctgaggttcctggcacaggagacacagccaagatggagcagagggctgctgtcagcattggccagcagtagtgcctatctaatgggtgtaaggatagagctgttccttcaaagggtttgaggacagagtgcttgcaggggtgccgggtagatctgaaatctcacgggatcccctgcaccccagtgctcagaaggggagggagctctgctcatgatagggtgccagagggatacgtaacacactgaaaagtattcactataaaagcacattgacagggtctctagactagcacattttgagagtccctggaacagtagagggtctggccttgtaccctagacttgactttgtatttcttactgcaccagctttagaaaaactccagctccccacaccccgggatccagacggtggaagctccaccaagcaaacagcaaggctttaccagccccaccctgcagtagggcaccacactctgcccccttccctctgttactgactgggaacagtcatgagagcttgtagaggactgtcatcttcaatgcccataactgttgacatcaggtgaggcattatgattttacatatattatacatacacaatatgtttggttcttgtgttctccttagtttcctgacttaacattcatggaacagcctcattatctcaggcctggaaatatggataagtgcattataaaccccttctgaaaattgataaatgccttgctcgtcttgtatattgggaagcaaagtgttctacttaagttttgtatgtacatattttaaggggtagtctttgtgtgtgtgtgtgtgtgtgtgtacaccttttaataaaaatgtaaaaacaatttttaaagactttaaacctctgtgatcaaaagctttctaaaaatatttggatgtttccctgctttattagaaggtagataattaactttttttgataactcatagggtcataagttactgaccttattgttggttacagatctgctgtttgtctaggggaaaaaagctagttacttgattactggctacccttattatgaaggaagagaacgttgcaaaagatgatagaccaatacatttatgagactccctatgaccctgttttgatagtaccttgctatatctccagactgtaaagtctgtaggaatgttagatctgttcctcagtaagacatgaactcactcccatctccactcagcagaaacattttaatttcttttctcttcctagtgtttgacatatcaccacagaataaaaaaagtgataccaacgccaaacttcttcaacctattactctcttttcctctccccagacatagaaactcacaaaatccctgtgcttctataatgtcattctaatccagagatagtggctgaattgtaataaaatcacagaaggaaattctattccagtgatggagaaatgtggtaaaagatactattttgttaacagcgattctgagatgatcagagtagaggcaatcacaaatggacagggtattcttcttttaattgcttttttgtgtgtacattaagaaggtattttaccctcaaatatataaagaactatctctgaaatctttacctttcatattatttacataaaacttttcctccctttttctaatttgtaacacacgaaatgttttctccatgttattctgttatcttgaattatgttatcctggatcaagaaatagcattctatccttctcaccaacatgaaacagaagtcatatcctattgtacaattgttaaatgattactaaaatcattggagtcaggtatactaaagtgtactttcatcatctggcagattatattgaataacaagccagaggttccattacttcactcccaactactacttctctcaaagaggggtgggtttgcactttgatatcctacttgcacacagatgtaaaaatctttgttccccttaggaaactagcatcttattattcatctactaccttctctgggaagagcttccttgatctcatttcagtattcatttagctcattacttcctgaggatcaaaaattactagaatgcttcatgagaaataaaacctgagattcccaaatctgcattactgatgatggaaaaacccaaattaacaacggaaggaactccggttcggtgacctttcgctaaacttttttttttcagtgtttagtaacacagaggcctaatcagcaaaacatgatttcagcttcctttagaaaaatgagacctttagagcaaaaagtgagttgagcacaaactaaattttggacccctaagcaaaacatttagagaggttcctttttcattaaccatcccgagaaatgacctcaatctgcaatgtgcaaggggtgggagagaggattagtgagtccctgtactctttttgtttgtttgtttgtttgttttgagatggagtctcactctgtcgtgcaggcttgagtgcagtggtgcaatctcatctcactgcaacctttgcctcctggattcaaccgtttctcctgcctcagcctcctgagtagctgagattacaggcgcccgctaccacacccagctaatttttgtatttttagtagagatggggtttcgtcatgttggccaggctagtctcgaactcctgacctcaggcaatccacctgccttggcctcccaaagtgctgggattacaggcatgagccactggatccggccccagtccctgtactcttgataagataaagtggccaaaaaaaacaaggtgttgtccaaaaactgagagtataaaaataaggatgagagaatgataggaactggggctagtgtgccaccttcaccctcaccattgatgacatctaatttcaggtagtcacaattgcctttctttggaaagggtgcctgtctggttaagatcaagttgacaagtgctttattatagtctctctactcttctgtacgtttgaacatttctaaaataaaaagttttttataaaaagtatgttgactggttcactagaaaagaagaatgcatagaaggcaaaggaagtgaagggtgtcagtccattcaccttgggactgaaaatcgtgagcaatctgccaagtcacaatgcaagaagaaagaggaggacggagaaatgccagatgcaaggagggcagcccacggtcctgctcaaagaactttttagggtgatgggaaggtccagaaaaaggaggacatgctgctggctgcatcttgccctcaacagaggattcagacagagctgtatcagcttcaaaaaccaaacacccatataccgagaaggcatatgctctgtttatttgacctgaaggaaaaaggattttgctcacgctgtcagacccatatatctacaaacaagtggaaacaatagatgtaaggcatggaaagaagtcatgtatagaaagaataaaaagaatatttgactgcttgactttctttaaaggtagtttagatcctttttggttaaagaaatgcctactatagggccaggcgcagtggctcatgcctgtaatcctaacactttgggaggccgaggcgggcggatcacctgaggtcaggagatcaagaccattctggctaacagggtgaaaccctctctctactaaaaatacaaaaaattagctgggcatggtggcgggagcctgtagtcccagctactcgggaggctgtggcaggagaattgcttcaacctgggaggcggagcttgcagtgagccgagatcgcaccactgcactccagcctgggagataaagcgagactccgtctcaaaacaaaacaaacaaacaaacaaaaaagaaatgcctactatattaatgacaatttatgtaattaattaaagcctctaatttttttaaactttaaacttttttgacttacagaaaagttgcagagtacaaagcttgtattcttcacaccacttccctcaaggttaaccatatgcttacataaccatagcataattatcctcatacaatactattaattaaactacaggcctcattagaacttcaccatcttttccaccactgtcattttctgtttcagaatcctattccggatgatcccatattgcatttagttgttacttctccatagagaagtattgccttccaggccataacaattcctcagtctttccttgcctttcttggccttgacacttttgaggagaactgatgaaaatgattttgtagaatgtccttcagtttgtgtgtgtttaatgagtttttttcttttttcttttttttttttttgtactttttgtacttttcgtagagacagggtttcactgtgtcacccaggttggtctcgaactcctgacttcaagtgatccacccaccttggcctcccaaagtgctggggttacaggcgtgagccaccatacctggcttgtttaatggactggaatgaggttacgtatttttagcaagaatagtataaaaatgatgttgtgtccttcttcgtacatcatataaaggggttcatgatgtcaatatgtcttattatatgatatttcacttgatcacttgcttagggtggtttatgctggttttttcactgtaaagttacttaatttttcccttggtagcaaataagcattttaagtgagatatgctgagactacgcaaattccgtttctcctcaaatcgttgcccactaattttagcaccaatctgtgaatcttgtctataacagttatttccccaatggtggttctgttttccactttccttttatatgtattctttggaattctacttaagaaagagttgtcccttctctcctatgtattcttaaaattatttatttatataactatggacttctggctattacgttattctgtgggtgaaaatccaatgctatcattttttatcttgctgctcaaattcctctgtctttggccatgggaacacatttatgcggactcctatgtccttttgacaagcccatgtcttttttctgtgcctttccttatttattggcactttaagatgtttcaggtttattttgtgtttgccctgcctgaactctggaatcaactgcttgctagggtggcttagttccttttattggacaatgacatttagaaacaagatacaggtgctgagtgagcttattgctactgggctgttgcttttaggccttatcaacagacagcgctcagtaatatacgtgtgtatgctaacccatttatatacatacagctatatttctgcatctgtctatctgtgtgtctgtgtgtgtgtatatatgtacatttaaaaacatgagttactgctagcctgattccaatccaacatcacagggttcatgctggccttctcctttctgtatccataactgtttctccatcaatgcgatacctctactaccctcctttaacttagaagatagttacatttcataataagctctaaactcattcatggattgatttggaaatggatttattcatttagaaaatattaatttggcatgtaccacgctgaaggccgtgggctctggagtagaactctgggtggattacaaagaaatcttaggccctgccctcaggtagtttatgggctacaagaaaacatattaaaagaatacagagagtaaggactgtttggagaaacaactaaattgctctgggagtgtagaggaaggagaaatgcactcccattgaaaaaataatgaaaggcttcatggagaagctgtggatctgtaaggatggggaggatatggatctgtaaagattaggggaaagcactcaaggaaatgggaatagcttgagtaaaagcacaaaaaggaacagaagtaaggcaaggcatgtcaaggaaacagaaaagctgtgtgtctgggtgggaaatgggtcctgtgagggaagcacgtggggacagctgggtcccggagctccatgaactgctggctgcagtggaatgtggccttgtctggtgggccgttgagagcccctgcaagtttgtgagtagagaagtgacctgtcaggagtgacacagtggaactcagaatggagggggatttggcggacagagaagatctttggaggagataaatatttggaagctactgaaatagtttagaatatcagacagggtctgaattagggcaagggcaacagctgtgaagaggaagggaagtatatgagcataatcaattttgacaacaaatttgataagagcaagaaaagagtcaaaggtaacttcaggatttcaaaaggagatattaaaaaccaaagctagaaactaggagataagcaagacggtgggaaagtgttcaatagccccccaaatgcagagttgagatagatcgcttccctgtgactatttcagtgctctgttgtgagtggacaaaaaaggagggaaaaattagactttatatcaaacagtgctgttactttttagcagcactggaagtctctagcagaggagaaaactacactaaaaagcaaaatgaaatttctagatggcaatgaaattgaatttatctgtggttgcggttagccattggcattgataatcaccacacagcggtattttctttgaaggtagatagttagcactctctaaactagaaattgcccccattttatccattatgactccgaggcttttacaacagagccatataacttcagtcaccagggagttttagaacactgaagttagaatggaaccatcaccgctactctattaatgttgtatcactattcagatgcagtttattgcagggaacagcttaaactcaaatatactagcatctatacaatcatgacaacacttattagttggtacataacgtatgggcagaggctgtgcttgccggagactatctgtctttcaggctcaagaagcaatggcgagtcagctgctgtcgtgccacagtctctgtttattatgttcttattatctttcttattatgaaaggaaagagctaaatgtgttcatgtgtttgcaggatgatagacaacttaaccatgtcatagggcaacaggaaggacagaagtggagggaaaaagagcaagcaacttttcttctattcgattgggaaggagtttggaactgcagacccgtcagctataaggaagtctggtgtgaatgcccagccttgccccagaggggaatgggtcctcactgagtactcctgcatccacctgctttcccatctccccgtttgtacaggtgagtgacttcaagccttattttagacaaagtgtctctcctgccccaaaggctctcacagaacaaagctgctacaacggttcctaaaacagacacaattcccacagaattatagataattttcatttcagaaaagaagataaagacattatttaattatcctctttgggatatgaaagtaccacgtggaagatggaggccaactatttcttcttcaggagagtcaaaagaaccacattgaagaagaggttcacaacagatgctaaaaaatctaagggtgctcatggcctgaatacgtttccaggcagagtttgtgagcagagttcacaaaggtgcggatgaagaccgttcgctgggcttcactagtacaaagacaggctgacagtgcaaagacgaagaggaacggtcccagccatcagggaactcagcagcttggaagatactaaacagccactcctccaggatgtaagttccctcattacaaagctgccatattaagaaacatctttataaattaaaggaagcagggttggcaggattgaagggtcaatgcaagcactgaaacacagtagcaaggaataggtagaggcagaaactgtgacgtggtaatcatcttctacccacatgtgctgtccccatacctcccatgacacactctcccctcagtcaccactttccctggtctctatgctctcaggtaccctcttcgtagtccctttttcttatgtttaaatgaggagtaacgtgacactagacatctgtacttatttactagtttcatgttagtatgttggttacttcagttcttatgttaccaactgatttcatgattttttttttaagcttctagttaggaaattgaaggctccgtcattgctataggcatttcaagctcggccagtaggctctgtatattgacagagatgagaaagactgctataggtacatttttcgttctctaaaaaaaaggggtaacagatgtgggggagaagaattagaagcaatgcagagtctgtgttttcttctttctcctaaggttatggctcgtgtcccaagttgttgggaaggaacctctggttgcagcaggactgactgtacaatttgtgagcccagtgtgaaatgaaaatgcagggccccttgatcaaaaattataaaaaaatctcaagacagcgccagcagagcattaaaacaagccccaagtcccaggcgccacacagcctcgctcttctgcagttcagctcttccttttacgttcctcttctggctacctcatttatccttccgtaaaccttcactgatgagagatgtggtaacccaagcaagtctatcgttcttgcaactaaaatgaaccagcacacttaggacacgacagggttcctgctgtcatttcttcctcttaccttgtaccgtctaaaaattgcagggatgtattaaaatgctttctactccatgttattttaggtaatatttaattaggtttttatgctttaatacgatgtctgatgttctggatcgtatcctctaattttttctactataataaagttcctgacactagtttaggatggactgcatcctcttcatcagaagcctttgtcttccttctgcctaaacttctgccccaggctcaacaatcctcctgtgcagtctccttccgtaatctccccttctgcagaataaaaagaactttgtaaaagtactttagaaataagcctggctcggtggctcacgcctgtaatcccaccactttgggaggcccagacgggcgggtcacctgaggtcaggagttcaagaccagcctgacgaacatggtgaaacgccgtctctactaaaaaaaaaaaaaatacaaaaattagttgggcatgatggctggcacctgtaatcccagctactcgggaggctgagggaggagaattgcttgaacctgggaggcggaggttgcagtgagccgagatggtgccactgcactccagcctgggcgataagaacaaaactctgtctcaaaaaaaaaagtactttagaaataattttttgatttgcttactactttgaatagtatttttgcctgcctttctttgcccaaatttttgtaagaaaaaacatcatgcaaataaaaggtactcaattcttatttttcacaacagggacagtaactttctcctcagattttcattgcttactttttacattagttcctcgatggtttataagcttttgtttttgttatcttgattttttttttgatatcttggaatttttttatgtcacctaatttgaactaactggaatggaaggatgtaatcatgtggggaaaaacataaaatactttcaaagaaactaagtttcattgatctcaagattatgcagtacctcaaactaaggttaacaaagtgttgcttcgttaacagggacttggagtcagttaagtgctttaataagtagataaggcttatttgcaattagcatattgattgtttacatataaatgagtgcttccaaagtgcttgaggggagcaggaaaacagcttgttaagagttttaaatgccccccttacagatcatttatctctatactaatagacactatctttgaaccaagtctttgctagtccaaggagatatcaaccaaaaagctaaaatcaccacacatttcaaataagtataattaattaatgatctttattttggggaaaatgttaccaaaagtcccttcagagtgggttcacctgatggacaaacaattgaaaagacaatcagatccagaactagtttcacgccagccatggtgatctctcgtatctccattttaaggaaaacgaccaaattccacaagttttgttcacagctgactgaaccaggtagaaggacccaacccaaggaaaacccgtggtctctgtatgacacagattggcttgaaaaatgagcttggtctgtcagcttctgaccctcacaagtttatctggaaacacagggaaacatagttagccgtggcagcagaacctaaaagcgacacagcagacagacaggccaagggaggggttgagtcacattcgaaagccaagaaactaagaaattcctatgaggagacagagatgtggagagaaagaaagaaagagaaaagaaggaagcaaggaaggaaggagggaaagagtggggaaggaaggaagaaaagaaagggacacacgcatagccacacatgtaagacagatgatagatggaacctgtgccccttggagggagtggtttgtccctatattttccctggttggctcttcctactcagggcccgcccatgagcatccttagagccaacctctttgtcctttgaggtaaactggggcgctgttgttccttactctgtaacttgctgtcaagagacgaaaacaccccaaaccatcttccaaataggagcaaggggtggggacagggcaggatggggagacatccaacacgtaatgcattttacacggaaaagcctccttctcatgcacgtgaatttgcttaaatatttccaaattttcaccaagacagcaccacaaaaaggtctttttctgggcttctcaaggcctacatcctgggagtgagtaaagctggtggggcggctacgctgtttgggcctgatgccagcaacatggtggagtctgtcacactcctttgatgttcacagtcaggacagcttctgcctgctaaatattaatccaatttggccaatcaaacttcaggtgtagtaaatgattacagtaacaggcagcttgtaacccagagaacccttccgcttcctgaggtcagcctggggctttgtttgaaaaccaggagtagcacagcagggaagaggcgtcccaaaggaagagggatggggtgggggtgtgtgtgaacgagtgtgtgtctgagtgcatgggattatgagtgtgactgttatatgtgaatatgtgtgaatgtgtatatctgtgagtgtatgtgattatgaatgtgtgactatatgtgaatgagtatgtgagtgtatatgaatgtgtgtgggactgtgtgacactaagtgtgtgaatttgtgtgccaatgtgtgaatatatgaatgtgtgaatgagtgtgtgtctatgtgtgtgaatacgtgtatgtgtgaatgtcatgtgtgaatgtgtttatgaatatttgtgagtgcatgtctgagtgtgtgtgaatgtgtgtgtctgtgtgtgatgtatgtatttatgaatatgtgaatgtataactatgcatgtgtgaatgtgtgtaagagtgtgtgggactatgggtgtgtgtgcgactatgggtgtgtgtgcgtgtgagtgaacatgaatgtgcatatttgtgagtgttgaggagggagggaaaaggagaaaaataaaagggaaataagagggtgtgtgaaaatgtggcaattctcttctcaactggaaatacagattaacatgtgcaaaaaacaaccctgacccgagttttcagctgtgcatgcggcggtgatgtcactctccattaatcaggaagcagatgctcctggctgccttctctccatcaccccctcagaaagagggtgagggcgtccacggggctcttcggctttcttatttctacccccatcgaaaggcaaatatgaaccatgtggctgtctccacccctgactttaaaagcatgtgtagttaagggacttcagcttttcctaaagagtattcctcaagggagtaaggaaaaaaccaaactcaaccactaaagtgttcttccctaaatgtcaaagaaatctggtgggttgctgatgttgtttttctaaacctctttgccctaacaacactttgtaacatacatggagtgcaagattctctttttgcagagagaaaataaaccctaaggcatagagtaattttctgcttgttgaatcttgtgcctggtttgtttcaacaaagccaggtttccttagcatcacctggcctaatctacagaacaggcacttccatgagagtgtaaccatgtttagcaaaaggtatcagtttgccagctacttaatgtcttgggcaacgtacggctgccaatatccactcaattagaaggtattaatcatgcattttactgctctccccctactgcctatcaccccccttcctcagcaaggcacagaacacagccgacttctcatgtaattcagccttccaggcagatgcagttacatggcaaccatcaagacacctcttttttttttttttttcggactgatattctattaatccttacaagtttattagttctgactcataacaatccatcagccataagtgcaataaatgatgcttggaaattaatacccacgtttcagcagagaaggttttatatattgaattatctttaaagttataaataaataacatacgtgaaatagatttaagcaataaaaatatattctgcaaacaatacccagtaagcttaatattcaccaagctgaagttacttgggcagtatcttaataagccctcaactccctgccctccttctcttccctggtaaaatcataaatccatcacatcaaatattggggttctttcttggaggaaaaatagggcttcctttatctaacacttattctcagtgtttcaagtgtttcagctttcctagggtttttttgttttttttttttggtttggtttttgcttgttgtggggttttagtttttaaatttttcataatttatttttgtgctttctgctaattttttccagcttctttaaagcataattggcatataaaaattgtatacatttaaggtgcacaacatgatgttttgatatatgtatacatggcaaaataattatcacaagctaattaacatatccatcacctcacatagttaccatttattttctatgtgttgagaactattaatgtctactctctcagcaatttcaagtatacaatacagtattactgactgtagttaccatattgtacattatatccctggaacttatctatccagcataactgaaactttgtacccttcgaccaacatctcctcattttccccgcctcccagcctcagataaccatcattctactctatcggagttagattccacatataaatgatatcatgcagtatctgtctttctctgcttggcttattacatttagcataatgtcctcctgcttcccccatgttgtcacaaattgcaggatttccttctctttagaggttgaataatattccattgtttatatgtgtgtataaacacacagccacatacacacaccacatttttaaattcattcatcagtcgatggatacttaagctgatttcatatcttggctattgtgaataatgctgcagttaacacaggagtgcaaacatctttttgacatacacatttcctttagatacatatccggaagcaaagtgggattgctggatcacatggtagttctctttttaatgttttgagggacctctatactgttcttcataatagctgtaccaatttacatgctcaccaatattgttctaaaataattcagaaattttctgagatatcttcttttttgtgtgtgcacacacttgtagttccacctacttggaaggccgaggcaggaggatcacttgaggccaggagttcaaggctgcaatgtgctatgatcatacctgtgaatagccattgcactccagcctgggtaacatggtgagaccctgtctctaaaaaacaacaaaagttgaaaaaaatacctgagatatctttgtttgcccttacctcctcctctttatcttttcccccaactcctcaacaaagccacttaaatagcgtttaaaaagtgacccccctgaaagaaagtcctatttaaatcgtggcttcagtagagcttttcaagaaccaaggccattagaaattcatcttgctcaagggaggcaagaggctgaattcaggagccaggagtttattttgctatataatgaaaacaagggagagtcaagtttctacccagtgtcaaacaactctatcacattcccatcaaaataagtcagaaaacatctgctaatttttacttttgtttttcaaaaaagagagggctcatagtgctatttgctaacctgtctttcttgctagccaaattttctaaaagatacactcaaattaaaagttttatagtgatacttttctttcagtaatgaattaaatctgtataattttattgaatgttgcccctcatggaaatgtgattattgcattgttgttacctataatgaaatcctttactcttaacctctttcatagattcaatgcacaacaacaaaacaccacaagatttcatattattgatgacataaagtgaattaagagttagtggcaaaagtctggtctagacaatgatctagcaaaggagttttttttttttttgagatggagtcttgctctgtcacccaggatagtgtggtggtgcaatctcagctcactgcaacctccgcctcccaggttcaagggattctcttgcctcagactcccgagtagctgggattacaggcatctaccaccacacttggctaatttttgtattttttggtagagatggggttttaccatgttggctaggctggtcttgaactcctggcctcgagtgatctgcccgcctcagcctcccaaagtgctgggaatacaggtatgagccactgcgcctggccagcaaagggtatttattacttaccctcagaggcaacaaatgcagaaactccacttttggctgtcccttctctagttctggtggcccttctctaatgtgtctcttcttcttaggcttgtctgcacacagatgtgctttctgcttatgaatttaggagaactacatccataaattacatcacacctttcctgcctacatgcaattttcctagacttcaaaattttacaaaccagagagatcaagatgcacaggcttccactcgatgtcccttgctgtattctgaggctaaaaagactaacactgatttagtggctgtctgcaaggtaaaagcattgctttgatccatatacccagtgctcctactttccctgcctcccatgccagtgtgtatatatttacatccctactaagtctgggcaccaagggctatgagtggcccccaaggcagaaagattttaaaatataagcaatgacatattctgaaattacaatagcaaacattttgaactgctctcagttcttgggtagatgatcaatactaaggactgggagaaaggaaacagcaatgctaagccctgggcctcaagcgcacagagtatcctacaagtcggggagaccctaccgaccatctagcctgactccatccgtttacagaaaaggacactaagatccagagtcatgaagtgattggctcaaggtcacaaagccagtatgaggcaggctaaggccagaacctgggcctactatcagttagtaaggctttttacactcattcaagccacctctagatcagacaatcagaaaacacaatgacattctaatacccatacgatgtcagcacataacatatcataatagtgcctgggtgatgagatctgataggcttgtgggagtagagtgatggtggttatgaaagaggatgaactcttttaatagcctgctgcattctgaaaaaatggcacaccttcattttgcctcaagggttacataatggatcaagataaaactctaaatttaaaaaaatggataattcaagtcaatggaggccactttttccctgataaaggtgttttaaagatatggatattatatgtattgtaattaaaataacgagactaatttttatgttcaacgaacagtacgcatagtgcctacccagtgcacaatcacctttgaatatacacaaacccaattaatgcaacgtgtggtaatctatagtctttcccagatgcaattctgctaataactttttataactcttaatgcatatatgtctaaagacagctcagtgaccagtcatccttccccgctctgcgcactgtgaagactggcttttcatttaagtctgcggtctacaaacagctttatttctttcctttcgggaacacatgatacctctatttgagaagacctatagctgttatcactgactctgcagttcttcattctctacatctcatctgaggctacctctttaatgattgtatgtgcttcttcctttcacactgcgacagaccttgaggttcccatacctcttgtataaattattattgcaaaaaccttttaattattctcacttctcctcattcttgacagaggcatcagaattatcattctagagtccaactctagatgtcattaagttgctcagaaatcttccatggctccccatggctaatagagtctaaaagtctctggtttactgcctgaggcccaatcttctgggcactccttggattcccaccatgtctctttctgcctactgatctcagtgtctagaatgcccttttcgcccattctcatcccccacctcccctggtcagctctctctattctccaaatccaagctcaaaaccctattctcaacaagggggtctttgctgttaaaatttaatctcttgtctcctgtccttccatagcaccttgttaatatctccaatgatagctcccaatacattgttatttgtgacttttttccattcaactatacattccgtgagggccgggatacctcctctgtctctgaacaaggcatagtacagtgttttgtgcacagtaggttctcaacaggcacttgcttttttttttttttttttgagatggagtctcgcactatcatccaggctggagtgcagtggcgcgatctcggctcactgcaacctccgcctcctcgattcaagcgattctcctgcctcaggctcctgaatagctgggattacaggcgcccgccaccacacccagctaattttttgtatttttagtagagacggtgtttcaccatgttggccaggctggtctcgaactcctgaccttgtgattcgtccacctcggcctcccaaagtgctgtgattacaggaatgagccaccgcgtccagcccaatagacacttgttgaaaccagttttgtacctctacatgccaaataatttgtcagtgccctaattttccagctgccatagctctttcacattgtttcaaattgttttttaggtgtatccttacagtcttcctttcttctcctctccactaccctcaccaccaatactgctttgtggttgcttcagttaactcactaggaacagtatttatatttattatacacttgtattggggaagcttgttttctctacgtgtatcctacccaatctatgtcatatctgcacactatgtaaagatttaatagggcacctaaagattgattggaatctgaactcacttcctggttatgtgactttcaacaaggtgtttaattgctttgagtcttggtttcctctccagtagaaagggataataattcctcaattctgttatgactactttggcaataatatgagaaagtcagctggcacagagaaggcattcaataaacagtatgtggtaccttttagaccaggccaaagaaagctgagaaaggaagcaagttgttcccaaaatctgtgttagctgcttcacgaatgagccccgatactcatgttcaaaaccagacccctttcttgggaccccacttggcttctccatagcacactgaattcctgaataatttgatgtggatgccattacttatccctcttcacatacacaacatgatgcaataactggcacataccacccttcactctaagagcagactgcaactcacactgcatttttccatgtcccagcacatggagacataataccagggaattgctgttgattaagattcacttgtgtaacttaggagttggttcaattttcagactttgttattaatgatattgtcctataatctatgttaaatatagatcacaagtgatgctgatgaatgggttggatctctcatttgtgttcgttcaatttacaatcataaattaaaatgttcaaatgttcttcaccctacaatgtagatttggtctagggtttcaatatgatgagttagtactgttagttttcataaaaacatgctgctttttaaaacttgttttctctttttagatttagctgtacattattggcaacacatactgcccagattatggaatttggtaataaattatgtttttactatctttgaaaattcttttcagggtggaagactttctagccttagttatatgtgtttaatcttggttttcttacggtattatgcaaattctgcaaaatgatccatggactcatccactgatgtgtatcaatgtaagtttctgaaacaaagtcatcaacatgcagagacaggttaatgctttagttacatagctttcaagagtacttatgtttattaagaagttgtcttcctaagggtcatgttgtagcctaattctggtacgcaaaactaggataccaagttaataaccctaatgtgttgttgttgttgttgttggtggtggtggtggtggtggtggtattggtagtggattttttcagggttgggggagaattctggggacagtaagaatgatagtaatgactagacatcaactaaaatgtacatgtatgtgtgcaagcatatgttgagtacatgtgtgtgtttagggggttgatacatgctaaaccttgttaggagcaagacagtgatgatcagctttgcgcccgatggtctaatatgctcttatatttcagcaggattacacataactgaaggaattacacaatcttctcttacttcacattagaaacctttaataccaagccggtcacgatggctcacacctataatcccaaccttttgggaggctgaggtggatggatcaccagaggtcaggagttcaagaccagcctgggcaacatggtgaaaccccgtccctactaaaaataaaaaacattagctgggcatggtggcaggcgcctgtgatcccagctactccagaggctgaggcaggagagtcacttgaaccgggaggcggaggttgcagtgagcaaagatcgtgccactatactccagcctaggcaataagagcaaaactccatcaaaaagaaagaaagaaggaaggacggagggagggagggaaggcaggcaggcaggcaggcaggcaggcaggcaggcaggaaggaagacatcctttaataccagaacaaagagccataatatcaagaagaacacaacccagaagattttattacattaatagcccagctaagagatttaggagtccatgcccacttacagcgtcatgtcattaaggctgatgaacacagggtagacagacgccttgctattttctatcctatgccctgctacaaacatgtggcctggaaccactttgtgattactgcagtaagttctctgtgattaatgtggacataacactgtccagaggaactggagcagacacatcttatctgagagccactgccctatgacatggccatgaggtcactcggccccctttgttttaggctgtatattacttaaatcagtcatcagaaagatgatttaaatcaaccttcaagaagatataatttcattactttttttttttttgccaaactatgtccctattgtctatactcctaatattaattataaccaactcagatttatagtttttctatgattaggtatatttcttatgtgtaaactatatagaaacacatgttggaacagttacattagaaaactgaatcgtgatttggtccttttattccccaaagctaaataaagcagatatctgtgaaatcacacagagacaaaccattttcaggttgacaggttaatttgggcaacattttctgctctgttctattagaacagctatcataactcaaaacaactgatattacatttttgcaggataaaatgtttatagagatatatttgtattttgaatgtttttgttcaacaaaagccatataattttaaacaaaaatgtacgatcaaaatttatttcatttatatatgtgaaatgggggtgctgacaaaaatttaaagaatgtttcacctaaaataaaaagattcctccaaaataaaaaacttaaaatataggattgttttgaatagcgcctcccccttctaatcatttcagtttgaagaagagaatgctgcttctcttacagaagagatgaagttcataatccttacagcatacagatgtaaaacaagatattggtgaagacagccacgattgacaggaaaagaacaaagagggcccacagttgttggtgcctggagacagacttgagaggggtcacaagtggccagaggctggaaaaataaaatgtctacgatttgaaaatagagaaaagaagtagagaagaaacaaacagagtactagagaagaataagaagcccatgtaattggagccatagggtgggaggtgggttatgggggatgggcacacatgaggttggtttaggcttaagaagataagcttactgcagcattcctggaattctagagaatggccagctctggatccaagtgattgcattcataatcatgtttggctaaaatgcaaatagaaagaaccaggatgaagagtttgcttcttaacctggatgtgtatcaacttgaattcaatgcctacactgaatgtacatggatttacctgtttggaatatgtacaatggagatcctcttgcagtagcagattttgtatgctaaataccacctttctgataacacgatctgttgattatccactataaaacatctggaatacaatatggtaacttaaggttgggttgtgggcctaaagacaacttttttttttttttttttttttttgagacggaatcttgttctgtcgcccaggctggagtgcagcggtgcaatctcagctcactgcaacctccgcctcccgggttcaagcgattctcctgcctcagcctcccaggtagctgggactacaggcgtgcgccaccacacccgactaatattttgtaattttagtagagaggggatttcaccatgttcgctgggatggtctcgatctgctgacctagtgatccacctgcctcggcctcccaaagtgctgggattataggcataagccaccgtgcccggcctaaagacaacatttttttttttattatactttaagttttaaggtacatgtgcacattgtgcaggttagttacatatgtatacatgtgccatgctggtgcgctgcacccactaactcgtcatctagcattaggtatatctcccaatgctatccctcccccttccccccatcccaccacagtccccagagtgtgatattccccttcctgtgtccatgtgatctcattgttcaattcccacctatgagtgagaatatgcagtgtttggttttttgttcttgcgatagtttactgagaatgatgatttccaatttcatccatgtccctacaaaggacatgaactcatcattttttatggctgcatagtattccatggtgtatatgtgccacattttcttaatccagaatctacaatgaactcaaacaaatttacaagaaaaaaacaaacaaccccatcaaaaagtgggcaaaggacatgaacagacacttctcaaaagaagacatttatgcagccaaaaaacacatgaaaaaatgctcatcatcactggccatcagagaaatgcaaatcaaaaccacaatgagataccatctcacaccagttagaatggcaatcattaaaaagtcaggaaacaacaggtgctggagaggatgtggagaaataggaacacttttacactgttggtgggactgtaaactagttcaaccattgtggaagtcagtgtggcgattcctcagggatctagaactggaaataccatttgacccagccatcccattactgggtatatacccaaatgactataaatcatgctgctataaagacacatgcacacgtatgtttattgcggcattattcacaatagcaaagagttggaaccaacccaaatgtccaacaatgaaagacaacattttaaaaaggaaaattccaccccctaaccctccaaggcagtttccaggaagttctgatataaggtctgttgactctcccagccttccttttctccttatttacttgggctattaagtaaaaatgagcttctcttcttttttaaataataggttctcaattaagactgaattattccaaagcaaacaactcttcctatttctgcagattctttgaattatcattttatgtgcttctgatgaattcagatgtttaaatgacttccagcaacacactgatatgactgtctaaaactttaagaaacattttttatttttatttttttaaaaaagatttatccttatacctggaagtttcatatttggtattagggaatgattactgctggatgccaatacctcttttcaaatagccaaacatttatacttaatatgaaaaccaaaccacagacaagctgccagcatattccacaacactgtattctttcagctataaagtcaaaggtttaattgcatgaaaatattcaaatattaataaatcatgttaactttaaactaggttcacaaactttgtttcactgattttaagcagcctgatataggatagatatttaataaatttgtccaatgtgtatttttcccatgaataataaaaccaaattaaaattttatttaaattgttgaaatgcttaattcctccagatcatgattttgccaatgcagtttcatctacctttccttgtacatcatacgaaggcatttattcaggcagtggtttttaataagccattgtaggaaacaaacaaaaaaaggtggaaggtgttgcctgggaactaatagctgtaataaggagccagtggattgctccttaataagtgtatgcactgcacaccttctcagtcctgattaactacattctattttagcaccagacatctaatgagaaaatgttaagtttccccaaatggtatgatggtagaatcagaatggaaaataccaacaaaccttgtgaacgctatcgccccaaaatgtgagcttgtaaaagaattcatcttagttccaccttgatttcttttgcattaatcattcaagatatgtaacattggaaaacttactgtgtgcaaggtgtgatgaaatcttatattcagaagctaaagataaagataatatatgcatcagtttcataatagccgtttttgaaggtgagatgaagtttattaattatttccacaaaccatctagggtgattctctcagattcagggaatgtgggcttgagcaaattttcatggttgatatgaaggacttacagctagaaccaaatactgttcagtctgtataacgagcctgacaatgtgaataatctcagtgcaataattttttttttgttaagcacacaggtatgtacaaacgcacaaaggtaactcctgaatagtcaataaataactataccaaacgtataactgctaattatgggaataatataatgaataattacagatttttttctaaatgcaagttttcatgccagaaaaaaattttatctccagaagaataatttgtgcattgcttaaacaaaaatcaaagtgaaatccttccaaacagcccaggtgacatccttggttttattcatgtaaataatgattataaaatataaaagctaaaacagctgaataaaacatccttcctggcctcagggaggtcatcagttcattgagggtcaagaaatactacacttctaaaactaccttatatcaacccttgatgtttcaaaaggaaaacaaaaatagcacccaaatttctccaggcagagtaagccacacacacacacacacacacacacacacacacacactctctctctctctctctctctctctctttagaaaagcaaagtttgcaacatgctataattaagctcacatcctgacagtaaaaacacaaagttttattctaaatatagaggaagaatctccacattgcacaacctttccaattgttgttttttaacattagtcattgatgtcagtgtgtcctttgcataaaaaagtccctttctgaaaatacacatacagtagacatgaaaattgtactgctttcaatttttatttagggtggagattttcttaaaatcttcggtagattttatccttgccttgtccttcctgtaagtctaaatcactatttaaatggcattttccttcttgctcttaaaatagcgaagtggtatttgctaaatggacatggatagctattcacagcccaattcctaagtcttagtcttctacacaggctgccctgatcgcctccagagatgaaacttgtccatggaagagaagctatacacacatctctgccaccaggaacctgggaaagtctggtttcatgtaacactaacaatgctgctacaaaaattacaattttctagcatggtggattggactctgtcctatttattaaaagaactgtagacctgagggcagctcaatccacaccttgcaaagcacccacatgtccctagcagaaaggagggctgattttaatttatggggcttaattaaccttttaatttaggggttagtggtaaagtgtatctagaatctagctacctgctgtgatcctggagcaagttaatctctctatgcctcagtttcgacagcaggattccgtctcaaaaatcaaaacaaaacaaaacaataactagtattattctcaattaggatttctagaacactaaaagctaccacttgctgggcatggtgactcactcctgtaatcccagcactttgggatgctggggtgggcggatcacctgaggttgggagtttgagaccagcctgaccaacatggagaaaccccgtctctactaaaaatacaaaattagccaggtgtgggggcgcatgcctgtaatctcagctactcgggaggctgaggcaggagaatcgcttgaacctgggagggtaggttgcagtgggccaagatcacgccattgcacgccagtctgggcaacaagagcgagactccatctcaaaataaataaataaataaataaataaataaataaataataaaaactaccactctacactaaaaagtcaaacgtggaaatatacaaaacaaaagtctatgtggaaaaacccaacaatttacaaaggtaaattagatttacaggaagcaaacacactcctgagcacttttgctttatccaaatacttcatttcactgttaagaacagttgatgggcctttagggaaaatatttcagctttcaaataactgctttgaaaaggactaaaaactatatttaactgcctcttgggcaattagaccatggccattgccacatctgctattttctcatcaggaaactgcttccaagacatttaacattcataggtgtattagctcattattaatactctggaaattctccatgacactattaactacagtgcagaatttgatgtaaggaggctccatcttggtttcaattcatgtaagaggattatgaaccgaattccctaaaggatgacactagaaatggtctcaaacatggactgaattatagcaaagctccaaagtgtaatctatttctaaaaacttgtcttcaatcatctcaacccttttctcatactttatctctatctcttcatattatccatcagtaattgttaaaatagcaaacacttacatgacactatgtatggacacgtatattaatacaattaaacctcacaagatccctgtaaggtagaaactatcatccccattgtacgtgtgagaaaaccgaggcacaggtaagagaggtaatacactagtagtgccagagttgggatgtgaacacaggcagtctcactccaggggtaagctcttccctatggccatgcagcctctacgccttattgacatgcttctaaaatacaaaagtggtagtagaaattttttttttctttttttgttttttgagacagagtcttgctctgttgccaggctggagtgcagtggcgcgatctcggctcactgcaacctccgcctcctgggttcaagaaattcccctgcctcagcctccctagtagctgggactacaggcacgcggcacgacacccagctaatttttttgtattttcctagagatggggtttcaccatgttgtccaggatggtcttggtatcttgacctcgtgatccgcctgccttggcctcccaaagtgctgggattacaggcgtgagccaccacacccggccagtagtagaaattaattagtctcagactcttatcataagatagaagcggtatcaggaattgaactcccactctttcagtgctctgtgatagcccatgtactattcttctgacaccaagataaaaaagactatttccaatgaatgcccattagatcagagattatgccacgtacaatctgtcacaaaaaaccaggaagcatgtcactgaaacagtctggcttgtaacataacttttattctaaagaaatacccatcatttgatactatggaaatctgaatattatgttgtacttttaatttacaaacacaaatttaattgacatgaaatttatcaagatatgaaacctaaaaatatcaatgttgtcttaaattccttttgacaagattgttaactgcttgacattttcatgcctttactttccttgaattcctcatgtgatggttcattttagttgttaacttgactgggctatgatgtccagttgtttggtcaaataccaatatagatgttgctaggaaggctagttttagatgtgattaacgttgaaattagtagactctgggtaaagcagattactctctataatgtaggtgggcctcatccagtgagttgaacacctgaagagcaaagacaggtttcccaaagaagcagcattctgccttcggactgcaacacagaaaacctgcctatgcttccagcctgcagattttggactcaagactgcaatattaacgatttttttttggagacagtcttgatctgttgcccaggctggagtgcagtggtgtgatctcagctcactgcaacctccgcctcccaggttcaagcaattctcctgcctcagcttcctgagtagctgggattacagatgcacaccaccatgcccggctaattttttgtatttttagtagagacggggtttcaccatgctggccaggctggtctcaaactcctgacctcgtgatctgcctgccttggtctcccaaagtgctgggattacaggcatgagccaccatgcctggccaatattaactcttaacttgaatttctagcctggtagtctggtctacagattttggacttgccagcccccacagtcaaataagccagttctttaaaatgaattctctctttatcctctatttgttctgtctctagaggactctgattaatacaaccagcacctccctcctatcacctttttcacaggagaccctcagtagagagtcctgtagatcaagcctccatcctgattgcccattgtagttcttataagaaaagataaagttggccactttccattacagcacacaaactagcaacctttctggaactgggtaacacattctcccgggtttgactgtggtagattctaaaccacacgccttctgtgaatagttgtggtttgacaagctacaaagacatacagcctggtctgtgtaagtccccaagtaggggccccagagacttgcggccaccctgctaagagtcctccagccaagctctgcccaagggaacagcaccacccacaccatcaaagctttgcctgcagctctgggccagcctgaagggcttgaagaggccatcgggttactaaatggcattttggtcaccttttctttcctcccaagatcgtgaagaacaacctcattgccctaatgactcccaacttctgtctgcacgtgggtttgattgttacaatcacattttgcttactgccaatctcccatttcagctgttcaaattctaggaaaccaatatttatttccttaacaaaagatctcaacaagccaagcctccttctctctctccctccctctttctttctccccatcctacccaaaccacaaagccctgttctttgtaaagggcctgtgctgggagctagaaatgtgtcacaccaagaacatccaccattgcccaaagctgttttccttgtggcttcttcagtagcagccacgctgccttcagtgttgacagtcagcaattttgaatgtgctgacatggagaacagtgaccacagagtcaatgcacaccagcaaggaagagaaaacaaatgcggaaatggaaaggtgatgctgggcctctgtctttccctgcttctggaggcccaccagtgaggtcacaggttggcctgtggaggcctggagggcagggagcacaggcagcctcacctctttctgctgtttccctgccatcacaacttggtccccgcatttctattttgggggctgacgcatgcagagctgtggaggagggagccattccctctaccaccttaggtccctctccttgcagctggctcctaccaagaggagagaggaaagggtcagctgtggcttctcggcagctctgtgaactgctctctccaacactgaactcaacaaatgttctttacattgctaatttgtttttgttctttttttttttttgtctccagtagcaggaaagtttggtaagcaaaaaaagatcccagaaaatttctgggtagcaagtctagtattaaggggggccaaggggtgaagaaggatggagccattaaattaaagcttacgaagggctattaggctgcgtgcagtggctcacacctgtaatcctaacactttgggaggctgaagcgggcagatcacttgaggtcaggagtttgagaccagcctggccgccatggtgaaaccctgtctctactaaaaatacaaaaaattagccgtgtgtagcggcgggtgcctgtgatcccagctacttcagaggctgaggcaggagaatcgcttgaacccaggaggcagaggctgcagtgagccgagatcgtgccattgcactccagcctaagggacaaaagcgaaactccatctcaaaagacaaacaaacaaaaagaagggccattataatatcactataatgctttataggcagactgtgagttggggattctggaatccctcttttcttggctctatctgggttagataatagggaagttatttagttcgaggtggttcaatgtatgaagtgatcaggtaggcagggggtctctctgtccagagatatgcagtggggcagttctgggacctggggttacacatgagcagggacaaaagctgaacttaatgtttggcctcctgcgtaaaatagtgcttctcaaactctgcagtttatagaccacacctggggtgtaaaaatccctaccaacctcggactgtcctcacatgtgccaagaggaaaacaaaatcccatccactgcagttaaaaaaaaacaaaaccaagtacatttggggggaataaaaattgcagcagaaatggctagtggcccaccaaagatgtctgcaccctttcagctgtgtaaatttgatgctggtgagtggctgcccagccaaggactgcatttcccacctcctcttgctctagaaggggatatatgacttagttcttgacaaaagactgtggacagaaatgatgtgtgccatttctaggcttggcccataaaaacctggcttggcacattaaagtcaggactcccccaaatcccctaggctatctcttttctcaccaaccagctggaagcaaaagattccaagatccgtggaggagctacaaggtggaaggagctcgctgcctgtccaaaaaatgcctggatttggactgttggatgacagagaaaaaaactcatatttgaggtcactggggatttcagggtttctctatcacaaaagttattttaactgcacaaaatcactaagtgatgtcagagggaaattattaattaggcacaatgacatagatgttaaacgtggtatgctattatttgggtttttaaaaaagaatgtgcctacatatacacttctatatgcttgagacgtctctggaagaaaacgctagaaaatagtaacagtgggtgcctttggggaaggaaactaggagacaggaagaaaggggtagaaaagagatttatctctcaccgtattttgtttttagccttttgaatttgtatcgtaggcatatgttaaccgctcaaaagttacatttaatgaaacaactttgtgcggtggctcatgcctataatcctaacaatttgagaggctgaggcgggtggatcacttgaggtcaggagtttcagaccagactggccaacatggtgaaactccatctctactaaaaatacaaaaattagcacggcatggtggcaggtgcctgtaatcccagctactcaggaggctgaggcaggagaattgctgaacctgggaggctacagtgagctgagatggcgccaatgtactccagcctgggtgatagagcgagactccgtctcataaaaaagaaaacaaaacacaagttctaaaagaatccagtttttagatcagcaggagaatgcttatgcacactactactagtccccagggcctttttcgaaaccagtggtacaaagtgttgacatttaaaaatacataaaagtgtactttctttgaaaactcaagggaggggtagcagtagctgctattcctatactgcatctgaattcttggggttaactttctcatgctcttagagactctcctttcattccaacggcgacaggaggctgatagcagagaggagtcaggggttgcttcttctattagatcaatttattcctaaatgtaggtaccacaagtcaaccacacaccttcataaaaaggattcttgggcatctttcctgaaaattctaattcagtagttctgaggtggagctcaggaaaccaaattgttcacaagtgtcagttgactcttgtgctcaggcacacttgagaaaccctgttctcatttgtccatgtgtcctccctgccaccttggataagttgcttcactttcatattttatatccttagaatacagacaatgagatttacgacctaggaaactcaaacgtgtctgctgagactaggtgatgcctgtgaaaatggctgaaccccctgcaaaatgacattatatacaagtgccaattatgattataattactattgttagcttgtgctttggggattgctattttgtgttttaaaattcactttatcaaaaatacttcattttaaaaagaaaaggtgggatagaaaacatgtctgtgtttccgtggaacacctttgtcagaatttctgctgtgttgctaggtgtttagcagggagtccgcatcagtgggtcttccacccatgacaagtacagctgcttccagaatgcacggagtggggaataagccataagggaagccctgcattaaggtgagtccagaggctggagccaaggcagctcaaacacaaggaaatccaggcagcaactggtctatggcagactgctttatggaacgggggtggatgcaagagattcactttgcgtaagaagtgtctttatttttgtttttttgagatggggtctcactacattgcccaggctggtctcaaactactaggctcgaggaatcctcccttctcagcctttcgagtatctgggattacaggcacatgtcattacccaaatactctgatgtgatcataacgtagtttatgcatgtaaccaaatagtacctgtataccataaatatatacaaaaataatgtatcgataaaaatttttaaaaattaaagaataacaatgataataataaaagaagcgataatgataataataatgggaaagaaagctaacatctaccatttttttaaaagcaggagaaatgtcttaaggagtcttaggctggccctggacagttctattttctgctcagcttgcaggtctagtctttatctctgaatattctaagatctttgggactaaaaggccatccaaccccaacccctcaatgttactcagagtccctgattgcaaattttttctacatcaattatccaaaaatagagaaaagggaaactaaatagatgcttattccctgggaaataaactgagtggataataaaactttaggttgatttgctaaatttttaaaatatcttaggagcaaacctgatgttttctaaggaaaactttacttttttttttaatctaaaagtttctctgtacaacagattagggagagaagggatagaggtattcaatttaaatcctaagttttccagtcatcttttggaagaaaccccaaattttaaaaggtcaggtccaaaaaggataaggtgaacatgatctactgtgattacaattgtttctttcttctttttaacaactgactcatgtatcaagtgctacttacatttgttttctcttttttcatcattctcaaaaaaatgaaatgctctggctgcaattttattatgaaatgtgcttaattccaaatgggtcccatgcattacacagtctctttaaatggaccacctaaaagcctgtgatggggatttctggagctcatggtagctggttctcctccttttctgagcatgtgggaagacttgctaggctctcaggtagttaactgggagtcatgttactagtctggccaatagcccatgagaaagagctgctgtgagttctctgtattcccttaccaggctgcaccaaacatggaggtcacataacatagtggagcttctgtcagcctgggcccctgagtgcctaggtggagcacagcctccccactcttcccctacgaacgtgaattggaaatatagagggaatatttggctgtacttaagccagtgaaatcaagaagggagctagaggagggtagatttgttactgtggcacaaccttaccttttctaatgcaaagcaactggtttgaaatctctgaattctactcagaatactggacttgctacttatataattggtagacaagtcacttaatctttctgagcttcaggttttttgactgtaaaatgggaacaataatttctggcatgtctaccattcacggatatgagaggatcaaatgagtttttctggaagtgttttgaaatctgtaagtcaactctagatgtaaaatactagcattattgctgtggatgtagctggagaaaaggggctaaatttcactgcttctttggggtcagttattagaattcattgcttcatcgttcttaaaaagtcgagcaatacatttcagtgatagataaggatcatgtaaaatcaaattctgataccacttggagaataatttgtaatctttaaaatgtcagggctagctgaatgatttcagaagcctcacttccaacaagcaaactcaactatttgcctttggcataaaaagaaaggaaaaatagagtccccgaatgaaaggtttggcacaaagccctttattcctcccacagcctgtcagagtgggagagggaggaaggaacagagagattgggcattccagactccacccctgcacaaagcgatggggagcgatatacattcaggagaggtcgtaccaatctattcttgtgtttctttcacagagaaaacagatttctccacacaggaaaggagaaatagcagaaatggcctccacacagatctagaagtagggcaagggcttgtgttccctgctgtccctgacaaaaggtcgagacactctgcttcgaacccaggagaagggcttcctgacccttagaacagatgacaccaatccacacacactgatttgctagcagtccattttcacccagctgcttagcttgctagatattaatagttggctttttttgcacacttactaaatgtcaagaagtgacattttatatctcaaggaactgatgcatagcaaggctgagcaacttgtccaacgtcacacagctggaatatggcagaaacaggagttaggcccagtctactttcagatgctgtggtcttaaccactccatttctaaggaagaaacagaaaacggaaggaaaatgggagcaattctgtcacctgctagataccttgcaatgggctttagccacattaactctcttaatcctgatatctgttctaacatgattggcattcttactccattttacaggtgacgaagcagaggctcagagaggttgattaacttgcccaaagtcacaaagccaaaatgcagcaagttaggaatcaaatccaaccaggctctgctagactaaagtgtgaaagtttgtggctgaaaataagcatgagtttggggaagaaaacaaaatgtattaagaaggcagaggaaacaaagaccatgggacgtatttagaagctggtacctctggttcctgagaaaaacaacccatctaaatacaggataatgcctgttggtagagttccctttatcacagagccttagtgtttacagtgttagaaagatggtgaatccagtgtttggaccaaagaatgacagtcctgcacatcaagcaaatctttttatacccaacaaacggagagttactatgaaagtagccaactgctttttctttggctgtctttacatcttctcactctaaattattatgatcatttacttccccatttccaaaacttatgaagcaccaaataattattagttgttttgttgttattttgcatcatttgctagtccacagctaaaatgttcccccaaccttaagctagataggagcaatgcaattatgacacaggagcaaaagaagctcattaacatatccgtgactgacacagaagatcattaattaggcattctgagcataagtatatatgtataaattagcatctattcaccatttaaactgtaagagatttttcatatctgaatattaactatgttggaaaattactaagttttcctgagtgaattccacaaacaatacccatccttgataacaaaaataaaatgaagataagggattctatgagctgacccagacacagtagagtctaaggacgttatcactctttatttatgaatgtcttcatttatccatttcctcttttttgtgtttctggctaccctccttgctgggtgtttcatgtggaccatcttatatggagaatgtttagatgaggtactcctgctgacattccagagatgctgtacctctctctgaattctgtcatcattcattcatttattctttcaataaatatttattgagtgtaacctatgttcaaaagacagtgtggaggatacctacatgaatatggcagagtttctattctcaagaattcatagtctagcaggaaagatgagacagatagtgcactcataaagctaaaaggttcggtgtacagttacaattgccagagcccaaaccctactcagaagaggaatagacttctgccagggggaagactgggaaatgctccatgagagaggtggcattgaagcaggacattagtgatcctagaagaagcagatctggcaaatttggggcatgtcaagagagtcacttatgcaagaaaccagagccagattgatgcctatcttcacgttcaggtcttgaattttgtgctacgtctgtggtccatagaactccacccccattttgttttaatgagtctgaagtacttatccgttttcaggccttcagaaaactactaatatcaggaccaaaatgataataatactctattgtccttcacacataggacaatgatactaattacttcgtagagcttgtgcttgcattgttattcttgcaatagtattggactcatgccagcacatccattgttctttgttgatttttcttgctaccagtggcatacttttgtaaaatggctatcctgggtgagggatgggatttgcagttctgagaccattttttctaggtggggctcactagtctgtgttgagactgaatcaaggagcgtggtcttttgggcatcagattataactacctgctctcaccaaccacattagtttaactgatatgtcttttctggagaaagaactaaagcattttattgaaatctcctagatgaagaaaggcagttaactgagtagcttgtaagtggggtaaaatctcagagctctcacagttcttgacatctacctgtaaaaaccaggtagcccatagatcagtgcgttcaaggaacaggcatggagtgtggacctttcctaaccgtcttgattctgcatccatggaattcagactatgggggctttcaggcagaaatccttattccaaggcttccatagcactttagttcttaaaatgccttggaaatgtttcaagacatatctgcttcatactgggtactgctctatggcagaaaagaaagctgctttcaaggtgagatttcaggtgtgctcatggaattaaaaaacaaacaaacaaacaaaaactggccagcagcagttttaatgagcatgtgagccttttccgcctcagcgagtggcaggtattgaagtttccggggcactctgggtcctgaaggaagtgaacagcttacctataatggactaatctgggaaaacattgacggtattgaggaaagaactatctgggatcatgactgctgatttcttccatgctgctagtgaaatataaatgtatcttttgtttgaggggcagatttatgtataacaagtataaatattccatttttctaatgcaagtagaactttttaaggtcattagtacccatgattaaaagggtaaggaaattcttgacttttagatcattacaggagataacaatgaattcattaattaaaaaactattcactaggatcatgttctataccctaccctgtgcctggcatgtcatagacacagacaaattgaaaagcagagactatcatttagctggagagaaccacagagatccaagtacatgcttgtcctagaaattcagaggaaaggaaagctcgtgatggtttgaggtcattccagaaaccctacattgggggaggaaggtatggagctgggttttacagaaaatgagggagttacatgatcttcatgacaaaggacatagcttgaatcttggaagtacacagagaataagaatcttgcttggatcatctcaatagaaaattctcgaatttcattgtgtcaaagaaggaatatgaacattctgtcctgtgcactctgctgaaatgtgtctgttttaaaagataattggcttcagcattgcatttgccccttctccctcactaccttttaaaattggacaaagctcttcccatggtggtcttcagagaaaaacagaatcctggattttatgctggagctcctctgctataccaagggtaggttggtaaagcttcacagaaagagatgttctgagcccaacctatggagacacgttccaatttaggctgtgggatgaaaattacagggcagccacagaggcaagtttaaaattaggacaaacttctctttgggtctcttaagcctcaaagagttagtagatgaggcaaaggaaaatgggggaaaaattaacagcaggaacttgaaaagcaaaatccccagacttctgttccttcccagggtcctcctgacatccttagcttttctgcacatctgaaaatcggcagaaagagcggagtcccacagctgcttcctagaagccactgcttaactttggacctgtgaggaaaacctggtggcaaataggtcaagataatcctggctaagaaagaaggaagagaaaaaaaaaatgaggcaaatgttctttagcccaagtccttttcctcaagtctctgtcaacagtaacccaggtgacttgagttcaaaaggagccacaggtgtcagtcagcctcaagtcaagacccaggagatagctctgttgggtgcatggagccttctcagatgtgcttacgtcactggttccagtctggcaaaagatctgggtttgcaggtaacgaccacctctcgactgcactaccagctaagaagcactagccatcctccctgaagaggtggcctctctggggaaacaacatgggggctctaagctgtgttttcttcttgcctctgcaattttgcctgtttctcaaagctactaaaaacatcacctgcagttatcttcttttgagattattttgactggatgcttttgtttgttaagagtttgaactccttcgaggaattcaatgattactaaatagagaacaaattattcctacttttccacagaaagaggtgttttcacctgaacaccagatgttttcaaaaagctcaagggtatacacactcaactaccaacaaatacgttccattagattatcctggagtcgaaacagaatgggggaggacccagtcaattccatcatcctggcaaggtcccacaatgagcctgttgtgggcccccctttttggaagtcatttgttaggttcacttcctggggacagactgttttagatgtgcctggatttctagttccgcattcctatgagccagaaagtagaatacaataaaatgtagaagaatggctgttttcacgtgtgacttccttactgatgatctgaagagtatttacaaagtttgttaaaggaaatgcccatatttggttatgtcactctttggaaaaaagttttcaataaacaggaagtaaaatgagtctccaaataaagtataagtacattcctaacctaatgcatcatgagaactaagacacaaagccgggcacggtggctcacacttgtaatcccagcactttgggaggttgaggcaggtggatcacttgggctcaggagttcaagaccagcctgggaaacatggcaaaactctgtctctataaaaaaatacaaaaaattaggtgggcatggtggcatgtgcctgtggtcccagctacttgagaggctggaggctcaggtgggaggattgcttgagcccaggaggtcaaggctgcagtgagccaagatcatgccaccgcattccagcctgggcaacagggtgagatcctgtttttgttttttttttttaaagttagacactttagagggttatggcttatctaaagtggtgatgttaaacctataactttctctgtccagagagttaataaatcaactcatcatatcagtgggcctttctcaataggtgttgccgtttagcctacaaaactcactttgtcagagctatttcagctcaagttagagcataactagttagacaacttgatctcattgaaatatttggtgcctgctgatatgttcaaacaaattcaccagatcttgattatgttctggcaattaaagctattaagtcagtagatagacagcaggttatttcattgctggtagaaaaagccagctttcttttctcccctttttatgtgacagcactgtaattagccttaatcaaatactatttgtgttaggtgctgtaactttgctttcttagccaggaaactctgccaatctaggaaaagtagaaatacaacttcggtcaaaaagcaagaaagatagggatagggtatttgagaactctctgtgctatctttgcaacttctctgtaaatctaaaactgttctaaaattaaaactttaatttttaaaaaccaagaaaaagagaggaagagaggaatgagagagagaggctgttgaaagtgaggcttcaactgtagcagcataacatgtaaaagcaagcttttagaagtagtcaattcatttagaaaatatggttcctctggaaattccaggttaaccctcttgttacatgggggaatgccttggtgcttcttttttttaccactgcaaataagtatgtaatggagactacagccaggtaaagggaacggcaataatcatgaataaaactgattttttttttaaccattcatccaaacttctagtttatttttccgtgttttaaacccaccatttcttttaacatccctggaagaaagagctcttcagatcgttttgggaatgaagttagtgaagaggtgaggcagggtttctcaaactttaatgtgcatacaagttgggtgcagtggatcatccctgtagtcccagctattcaggaggctaaggcaggaggatagcctgaggccaggagttcaagactagcttgggcaacatagcgagacccctttgtcttaactaactaactaaataaataaacaaacacacagacaaatctcctagggatcttgtgaaataacacattttgatttgggaggtctagaatggtccccaagattgtgtttgtagaaagcgtctatttgatgccaaagctaccggtccacagaccatagtttgagtagcaagggtacaaaaactagtaattaagtaagtgcaactggccagaagtagaaccatggtatcttgtctacgtggccgacaatgaaacatcggtatgaagcagttgccaacaaacagatactcactttctattttccttggccaataataccttgtgtcaaattttcaaaatgcattggtaaaatggcattataccttgggtcagactattagctcagagaatcccaataatggaagtaactattcttgttcaaagtgccccagccatgatagggaggcatcagagacaattgtaaaagcaatgatctgatctttatttattatttggactctatgtttcctcatacctcaaattctgtatctgtacaatattagcaactagaactagtaatattttgagtttaaggaagaaatgtcacacaactcttagagcctcccagaggtactctgtcattttaagagatgatgatggctatgttccacaggagacaaccctgccatatggctgacattcacttgacaacaatatgattcatttcactccatccaaaatggtaagataggccattaatgactttgaataactgaaaaacatatttttacaggcatgagccaccgcacccactgaaaaacatatttttaaaaataccttttgacccagcaatcccattgctgggtatatacccaaaggaatataaatcgttctactataaagacacatacgtttattgcagcactatttacaacagcaaagacatggaaccaacccaaatgcccatcaatgatagactggataaagaacatgtggtacatatacaacatggaatactgtgcaaccataaaaaggaatgagatcatgtcctttgcaggggcatggatgaagctggaagccatcatcctcagcaaaccaacacaggaacaaaaaaccaaacaccacatggttctcactcataagtggaagttgaacaatgagaacacatagacacaaagaggggaacaacacacaccagggcctgatgggggatgggggtgaggggagggaacttagaggacgggtcaataagtgcagcaaaccaccacggcccatgtatacctatgtaataaacctgcacattttgcacatgtgtcccatttatttttagaataaagaaaaacaaaaattaaaaaaaaccatattttttacaatttgtggtaactgccacaaatgccacatgtctagttctccaccaggttttttactcctttatacaatgtttgaattccaaacaatggtccttttactttatttatttatttatttttaattttattttctgttttattggtacacaagagatgtacttctacttattttagatttcttccatatcttgattaatgcaactcaattaggctttaaatccagtggtatgctggcaaatagctaacaaccagctctccaggaaaagtaaaaaaagaaagagaagtcttggtatgtacctttggtcaattttgatgatgtaaatactctcagcatggccaatttcaagtaccaacttggctttaccgaatataaaattaggaagaaatgtacataatcacaagtctgctccagtacataacagcaagtgaccccaaagacataaaacattgttgttttaataattaaattacaaaaatctagcaggggtaaaagtattctacaattccaagacagcttgtctcttaaattgctttcactttgttactgaaaagtagaagtccatgagtgtttttataaacccaaaataactccctgctagtttttttttttttttttaatgacagtctcatgatctgtgtaattaccacagaatcttataagccatttggattttcatgacacaaacatactgaaagtttggaattctgtatgaacttgagagttgaacctttccatttttgttttttcctactattataagctctcccttccgtaagtattaggcatggctcaggcagcctctgtggccataacaatctgcagaaaatactaaaacatcaccatgttttaaaatgttccctacaattgcctttgagaatggcagcttaatatcttcatgtcctctcctatatctgaactgctttgcttcaattttttaaaaagctgtcttatgttaaaaaggacaacagaatgagaaaactgcaattgtagccaaaatgttgtaacaatggtgtgttttatgcacacttaacatatataactgtttctaacacatcatttcttcattctatttttaatctatctgagattctttattaaactgtgttttttatatttttagtcacaagtacacctgcttattaccagtgagggtcttttttattttatttttagagaaaagagtgtcttgctatgttgtcctggatagccaagaacccctgggctcaagggatcctcccgtgtagctgggactaccagcacacaccaccactgccagctccagtgaggttcttataagaacacaaaagcacagaaggctacagctcacaggattgggggaagggagggcactggtgaaaaactatctggccaagtaatataattaacttgaagaaaaacatttgcatcataactatacttgtgtctttttccatcagcaaaagccaaaaccaagcaaataaaaagccaccaccattcacccaccaccttgaacacaaatgattttggcagtgcagtcaacatgaaaaaatactgcttgaaacaaaccaagaaaaaattgcttccaatcaagtcttcctgcttgctttcattgtattcactttcataccatttgaaatatgtatcatgtgtacctgttaactcttcgaaaatgaatcttctaaagtcttccaattttttgaacttttcttaaaattcattttaaccgagcaccccacttatgatgaacacgttaggttttaacacatgcagaacacggcacagtacaccccctgccattctccagatgttaggaactagaaacatgcaaggatttttcatgttagaaaaatggtgaagtcagctcatcaaaggtaaaacaggcagaatatgtccctgcctttgcctttcctaagatgcatttacattcacttggtttgtctctagtttgacaggattattaataggatgggcttaccactcatgtagatgaatctcttagccacagaaaagccttttactatcttacgtgtttctgaccgatgcctgatgactctaccagcggatcttcacagtaaccagagatgtgggctagtgatcagttacagagcaaaattgctaacattattgtcactaaattggagtccagcattattttaacaaattttttttacatcaacgagcagtctttggttaacaggctttaagaatgacaaaaatacccatcatgaaaggaaaaagtgttcacaacactggaccttcttgaatgactgcgatacagccctcctgacttcccactaatcaagtgcactagccctcctggatataagctgaagctacatcaagaactaaaaaagagacatgaagaataaagatctgagggacatagacatgaacatggacatacatgtacacatagatatattctggtaaataaaagaatattcatgccatttttaacaattgtgaagaaatttaattatacttaaagtaaggatcaaaattgaaaaaagtcctaatattagaagaatcaacacagcaacaatggaaaagagaggctctttttttctctgagggtcacttcataaatatttgggaatttctcactgctaagtaaaaagaggagaagcagatgatgaaaaggaggagttataggagttcaatgaaaggcagtcgccccctcaaaattcacagctcttccctgaggtcacctttctgtctcttcactggtgcccttcctgtgggtagcatgtgggaaacaggggaaggaaaagggattgagaatcaagctggcattaaaatacaatcttaccctatttccctgtggcctacagtactccccttttgaaaaaataacgtggaaaaaatgttgttagttttctttttaagggacacacacacacacacacacacacacacacacacacacacacacactctattcttcatccccggcagtttcccaaatgagatctgccatcatgaggttgcatacataaggcggtgagagagagtgtgcctctcctgccaggcctgaagagttcttgagggcatctaaaactgaaagcttttagcaaaacacagatgcaagcaaattacaaaatcatagtgtctgcaggactggattctggttggcacaggtttggaactgattttttcaaacgcctggacaaaggggaaacagcctccctgcctcttggccagccctgtgctgcattcagatctcactctgtattgttttcttgccatacttgtatttaaagtcaacctctgtttcccaacagacacccccacagatacacaccctaggctccacatgactttcaagtcacgttagggcatctgtccttcctcaagaatctgtgaaaagtgagaccctgtctcaaaaaaaaaaaaaaaaaagagaaaagaaaagaaaagccaggtgcagtggctcatgcctgtaatcccagcactttgggaggccaaggcgggtagattacctgaggtcaggagttcgagaccagcctggccagcatggtgaaacccagtctctactaaaaatacaaaaattagccaggcatgggggcacacgcctatagtctcggctaagtcaggaggctttatacaatgacatttttaagtcaggaggctaaggcatgagaatcactgaacctcggaggtggaggttgctgtgagccaagatcgtgccactacactccagcctgggcaacagagtgaggctctgtcttaaaaaaaaaaaaaaaaagaaaaaagaaaaaaaaagaatctgtgaagtgtagaccagagcccatatgaggtttatttgcaattgaagttaaacaacactagggactcaatttgacccccattacctggctgctttatcttagtgcctcagtttctccttgggtcaagaatgttactaatgacccttggcaagtcagcaggcaaaaccattcttacagtaataagtttgatgactacatagtgcttgttacagtccagactttctctaagtgctctttctgtattaatttacttaatcctcacaaactccctgaggtgggttctgttaggcccattttacagatgaggacactaaggcacaaggaggtcaagtactctgccaccttgagaggaagaacaggcttgaaatcctgtagttccactccagaaaccagctcttaactaccatctctcagtaagaactttttcagcatacatgaccatttaaatgccttcatttgcacacactttagtggttgcagggagtacagaaagcaaatcccaccgctgatgtctggaggacagaggaggctgtatcctaccagcattttccagtcccagggtagcaagcagagcagcgtgctgccccaaacctacctggaagcactcaagtgactatagccagacctgacagaaaacacaagcagagcaagagaaacagaagtagagggtgccggccctcccatcccagccagagtgggaagggatggagatggagcaaagccagccagccagtgaatgggagacctgaggtgaatggtccaggaactcagcactgatcttgataacctgcagaggaaggagcttcctgagtggaagggagggaaggtttgcagtctccttctcccctttgcagaccctccactgcataccagataatgatgggctgaccaggatttgtagcacactcccaccatccccgccgtgggataggtaggtaggtagatagagaggcagggcacgggaagagagacagactgatttaaaatactcaagatggaaccagtcactcctcacttcacccctgctcccttctacttccccacatttttgcatcagaaaaatatgtttggagaaatgaacacacacacacaccctctctctctttcttctttcagcacattcttttgtcaaggacctttataagcatgaagaatttccacatttgataatttacagcaaacttttcatttgggtattaaaatgtagacatatgaaaagctccctgacaccacttctggcaatagtaacatatttatgtaaaagaattcacaatacagattttatgttaatattccttaatctttacttcttgcatttcaacttaacctcgctcataggaaacagcttccagactccccttcaaatattcatagggcctactgtagatgagaaaagcatgctctacctaaacacatgcctcccctatctatctcctcaacctcgctgccactataaacattggcagccctgactataccggcgattccgcaccactgactcacaaaaaagtgtttccaaggtgaagcacctgatggagtagacacatgttaagtaacatattggagttcctaaaattttgatagaaatataaataaatcaagttttcagaccttgatctgccactaacatctgaccttgggcaatattcaacagcatttgatgaagatttttcattaactactgggtatgaggtcagtgggttatgaaagatacagtccctgccttccagatatttgccatctagtgaaaaaggtagacatagaaacacgagctgcaatcaaagcaaagtacaactattgtcagagaagtctgcaaatgagtgttgtggaaatgcaaggaatcaataattaaattgaactgagaggattagagcaggcttcacggacaaggtagcatttgagtagagcattggatgaaattagttggattttgataggtggagaagatgagcaagaaaacacaagcaaaagctggaagtaggaaatgcttggcagcacacaaaggcaggagagtagccagggggattgaagcacagtctgtggaggactatggtgacagggaggtagatggtggctctgaaatcatggtagggactttggacttactgtgcaggcagtgcagatccacccagggtcttaagaggaaaatggagcatgggttttaaaaatggatcagacaatcaagagattagtaagcagaaggtgattaggaggacgcccaagcagtttaggtaatagatgatgaggaaagtcattcaatttcagggacttagcaccatctccttttctccaaatgagggaacaaggtcagctagagaagcaacaagcctaaatatcttgaggcggacttaggggctcactctcctgaggttctaactgcacctggtacatgatcttcatcacagcagctcccattgaattttcacagttcactttcatgtctgtcttcttaccattaaaagtgccttataagcagggcctatggcttttcactgtttccagaggcctagaagagcacctagcatatggcagtcagtcaaacatcccaatcatgctactctatttgttttgatttccagagaaagatatggaatcgcccataatcacagatgagaaaataaaaaatccaaatttcctgtctctactgttaactagttctgtcttagaactagaaagccttagaattatgatatgtgtctatgtattaaggaccgaggggttagtttcacattcttttcatatcccagttttcctttctagttctcaaaaagtggaaccaccagcttccaacctctttatctcctctaattactaactcttctcactgagttatctcctctaattactaactcttctcactgtaccttctgggctacctaaactgcactgcaactacaactcatcacgagcctcccaggcccctctcaatcaactctcatttggtgattgtggactaaaccacagaaagtgtccaaaggactctctttatctccagctccacagattctgtttcaaatgtcaacttccctcaaattcttggctgcacaccaggtataactatatttaatgatattggtatctgaatgaacacaacagaaccttagagaataaaccctcaatattcatgaattcccaaattcagaaatacaatagcatataatttgccttgtgcttcataatataaatatgactgaaaatgtaagggatctcctcaacccctaatgacttatttccctcttaaggagtgatttttgcattagtcatattttgctctgaaataattttaattttttttcttattttcatatggtaaattcattcatggccatgacttaaccactctttaatctggtcaatacttccattttctgggttaggtagaattactttcttagtcttcttcacttccatctctgatactagcacttgactttctttggggagccatttctaaagaagacaccttaaaaaaaatcacagtgtgagcattccctggtccagacttggaatggacctttctcatggccctatgagattgggaggatcagcagtgggcgtggctcattcactagtggacccacttgctctcagaacccattttagcttgtaaattcaagattcaaatttatgctttggcaaaactacagatttctttctatctcacacttttgatgttcttttaaatacacaaaatgcttttctttttttttaaaatttccaacttttaagttcaggggtacctatgcaggatgtacaggtttgttacataggtaaatgtgtgccatggtggtttgttgcacagatcatcctgtcacccaggtattaagcccagtatccattagctatttttcctgatcctctccctccttcccccaccactctccacaaaatgttaaatctgcaaataccaggtgtctattaaggaaccaaataaatcttgccctctacagtggtagccacattgggcaacatttctaaggtttattataaaaatatatccaatcctttgttcaaaatgtccttgaagttcaactttgaaatgaccatcagaaccagtttacaagccttatcagaaaacagaggcccatgactttatagtcacattttgtttttgactcagagatgcatcactccatgtgatcaacaaccaccttagccactagacttggctccttatgcttttttcacttcctgcaaagtcaagccactaaaatagttgccaccaaataacagtaatagcaaaagtgtgctaaaatgagagaaggttttgggaagatggcaatgttccatatcataattgtgatggtgattatacaaatgtatacatttatctaaactcacagaagtatgcactgaaaattagtgaattttactttatgtaaattatacctcaattaaaagttttaaattgtgaattctgacgacaatttgcaaagaggaattatccatatcttaagtatgaaaataaatgaatgaagcttttgataattctaaaggagcaaaacaataacaatcatttagattagctagagaactatacacttataaacaaaatacaacacagaatacattacctagattatgcaccaaaaataccaggtatttcattttctctttcagatgaatatactacctggattctctttcagtaagactgtgtttctgatgaagttcattgagccatttacattttatcttggatttgtgaccactgatattcagctgttggatgactacttagagtaagaatccagtgtttagccataaatcaagctacttggctcattcaggtgtttcatccttcttcttagcatagtgaaatcatgctatggtcaactaagttaagtgacccagtcatagggccaggccgtgggtcactaatattgggctttaaaagagttctctaaaaccagcaggatttctccaacaagtcatttcaaacctcaggagctttgttttggctgcagtgcatgaatagcaaaggcaggctgaattcgctttccctacttcagtccattgtttaggtcacatgcaggccaaattcaaaacagtgctgaatctatcggcgaagattaaaacactggaaagtcattattgattcgtttgggcgggtctacgtcgtaaaggttaagtgtagtaagtgtaggttctggaccacagactcttggaaactctttgtttccttgagcagttattactggaagggagccttggcatcacccccacagggagctatatattcaagtcaggccccagtcaggatatttcttggtcaaaggataaatgaggtctcctaaaatagtcctgacaggccaccaacatctgtgaataccacaagttcacacctgtaatcaaaaccacttattctccaaaaaacaaaaacaaaaaccagctcagaggatgggatgctgccacaattgtctctcccttggagacaaagaatggtcaaaaaccacttgctttgataaatcttgctgaagcaacaaaaatagctgtgtcatgcagagatgatagaattacctttcaccattacatcagaacaaaaacctccaagaaaggcaaaatttctcattctcccatctaactacattcacaggcaaatccctaaaattcaagccaaattacatacaagtattttacatagctttttgcatttagaacatctgttaattcaaaatgtggttgatgaattaacggcctacaacgttcctttaaaaccaaaccacctaaaaatcaatttattcttacatttaatagttttttttttttttttttgagacagagtctcgctctatcacccaggctggagtgcagtggcgctatctcggctcactgcaagctccgcctcccgggttcacaccattctcttgcctcagcctcccgagtagctgggattacaggcgcccaccaccacgcccagctaattttttgtatttttagcagagacagggtttcacagtgttagccaggatggtctcgatctcctgaccttgtgatctgcccgtctcggcctcccaaactgctgggattacaggtgtaagccaccgcgcccggccatttaattgaacttagtaagtgtctgttacatgagtactatgttaaccactattataggagattttggagaagtataaggcatgttatcattccttaatgtacttataatttcattgagaaaggcagtgtacacattaaacagctagttgagcgaatttggcaatatcctaaacattgctgggcttctatttcctcactggtaaaatgaaggagtcagaagagatgattcccgagactcttctaggtctcaagttctataaacctttcaatgcctacgtagaaaacaatccaagataatatatggtgaagtccagataatatatggtcaagtccatatattatattgtatttattgataaataatcaatacgataggaggtcagagaagagagagatcaattttgaggtggcaaaggttttctggaaaaagaaacttcagcttggacttgaaggacgggtagaatgtgaaaggggcaggaggtggtcactgtttactaagagtgcagagggcttgtgcagggtgactggaaaaattcttgattagggacagggaagatgagtttgtatttgtctctgtggataaagggattatatgttgtcaagtggtggatttaagtaggggaagtgatatgacgacttggtgacatgatcctattaacctgcaagtcagatcacaccattctcttctcagagccatccagcagcatcccatctctctcagataaaagccaaagtccttgcaagggcttgcaaggctttgcagcatctgcttcttccacccctatcaactgtcgccttatgtcctcctctcccacaccagcctcctcagagtcttcctcatataccaggcacacttcaagcattttcacatgcgtttcctctgcctagactgctctttcctcaggtatctccatgtttggctactccttcatgtaattgctcaaatgtcacttttcagtgaagccttccctatcaccgtatctaaaattgcagcctaccctttccatacacacaggctcacacatgaacacgcgtgcaggcatgcacacacacacaccccatatacctccttatctcccttccctgctctacttttttcattacatctaccatattctaccatgtgatatgatttatttactttctaaaatgtctctatccactgccctcctcccttaggtagtataaactccatgaggaaagggggttttgtctgctttattcactgctgtatgtctcaagcctagaacagtgtctggcctagaataggggcccaggaactatttgtccagtgaatgaaggcatgaatataatgaaaaaggtgtgaagtcattaacctcacagattgaactgcaaagtggagggcctagaggttatgaaaacttggactaaaggaaggcaatgggaagaaaaaaggagctgactaggagagacttcatcaagaaataacaaccaggggctgttaactatctcagtgttcaggcctggattaaaggaaatatattcaccatgggaattaggagaatgttaggggcaaaagaggaactgaaaatgtactgaaaataaaatgatgcatagttttataaacaaatatcagtcagatttaacttcagttgtttccaaacataattgattgctattttcttcctgcttacatttctgagaatggctaaaaggaaactaaaaaagaaggaagtgggaaatgtgtaacgtgccatactttccttttaaggcaacttcagcctgaatgctgggcaaagcctcccacatttcacaatttgttctctatcagctctcaggaacacaaaatacaggaaagacagatcctgttcttctggttttttttcttttcttcttcttctcttcattatgttttctcctcccccaaaaacagtaatcagagcagatgacaagaaatctttttaacatcagccttggtgtaataagcatcttggaaatggaaaaagcaagaggggatgtgatgaagtctttaccagtctgtgcagatgttaagactttactagagccacagcaagaaagtactatttatgtcaggttaatatcttattcatacatttctttagaaattatgaaggcatagtacattaacatccagtcatccaatattacttagaatcataggtgataccttcaggaaaaaaaaggtggatgatcttatttcctgattgaagaaatctcaagtacagttgagaagccatatgtggttagtatgtacttaagatatgagctttaaaagcaagtcctacatttctgcaaattcaaattttactattacctcttttaaaattcagtgttttttagaggcatttgcttaattaagtttgattctatacttatttttctgccttttaaatacataccctaaattaaaactaaatcagtggttctcaactagggtgatttttttttccctccagggcacatctggcaatgtctggagatagttttcacgactgtggggagaagagggtgtcacatccattaaacagaggcccaggtactatggtctgaatggctgtattcccccaaaattcatatgttaaaacctgatcatcaatgtgccatattagaaggtggggcttttaggaagggaatcaggtcgtaagggcagagcctcatgaatgggatttgcccttataagagttcctggtgagctgcttcggcccttccaccaggagacatgcagcaagaaggcaccatctatgaaccaggaaacaggccctcaccagacactgaatcttgatcttcaacttctcagcctgcagaactgtgagaaataaatttctgttgtttataaaccacccagttaatggtatcttgtcatagcagcccaaatggactagggatgctgctgaacatcccagagtacgcaggacggcccccgccacagagaagaatctaatttaaaatgctgatagtgccgagggtgagaaactctggcctaaatcatctctgatagagatccccaaattatgataaagcaataaccattttagtccaagtgtgtccttcacataagactaaggagtggaagagtggagctctgcaaattgcattgtttaaaaatgcagtcagaccctactttggaacattctgcccttactggtaatactaattatgaacatatagattaagtctccagataagaattaaaaggatgttctggccaggcgcggtagctcacgcctgtaatcccagcaccttgggaggccgaggcggttggatcacctgaggtcatgagttcgagaccagcccagccaacatggtgaaaccccgtctctactaaaaatacaaaaatcagctgggtgtggtggcatgtgcctgtaatccaagctactcaggaggctgaggcaggagaattgctggaacccaggaggcagatgctgcagtgagccaagatcttgccactgcactccagccagggccacagagtgaaactccctaacaaaaaaacaaaaaacaaaaaacaaaaaaaaaacaaaaaaaggatcttctatgctcttttctgttcctacacagaaattacaggaaattcatcacagaatcagtgaacaccaaagctgaaagggactgcagaaggtagcacaatggatcctctcactttactgatgggaggggaagtggtgcagactgaggtcacagtcttgctttcaggccccagctggtcagtttcagagcttggattagaattcactccatccctcaggtctgtgctccttctccttgactcggaagcaaatgtgaagaatggagcccaagaaggttacaaaaaaaagtctttggaccaaagtctctctcttgatttcagcctcaaaggaagtgagctaatgtggagatgcatggcactcctggctccccatctttgggagtggtgagcctcccaagcacaggaagattcagcaccaactctagctgcagatctatcccaaggcccagattgcattagccaagacctctccaggaagcctgttggagtgagcagagaagagcctcaacaggtggcaagtggtctcaagtgccacttctctctgaaaggaaagtcctgcaaaaatgaaaatctgcaaatgctttaaaaacgagtggcagaggatggcgtctctgccctttctcctcctgggtaaagggcagttgaccctcactatgtcttccaaatgcctcccatgacttcccagcatcaaccacatcaaaaaaaaagagagagagagagagcacacaactgcgctaggcattcacaacattctcttccttcaggggctccaatctgggccctggcaggttatcaaagagacttgggtctctttgtcccccatccctaatctgtcttggtgtctctctttggccctcccatggatgacatcccccccagagaccttgccagtcagcctgcccacctggcctccccacagaactggctatatagcaggaaacggatttgccacttctccatttccagatggcactgaaacaagtacacatcctcctttcactttcaaagagctctatgactactttcaaagagctctatgactactttcaaagagctctatgactagttaccttagagaaactgacagaacaaaggaacaagcctgcttatgtggtactagtaaaatcataatatcagccactacttatgaagcattttgtatgtgtccggctctgtattaggtgttacacctgcattatctacaagcctttcatcaatcctgcaaggaaagtattagttttactcccattgtaaaggtgagagaactaaggattagaatgatttgagaccacagaacttgtaaataaaattttaaacattttggtctaagttgcctttctcttcaacatgctagaaatgagtctagacttacctggctcatagctccctctttagctcttttacatggcattcatttaaacatgccttctcacatttttctgcttggaggcagagcttgtccaaccacccctccatagacaccactgcctcccagctccatttgcccctgtctgctgagctccttctatactgtccacatgtgttctctagttgctgctttagctctatccatgcccagccactaacagttgggttagtggttgctacggtttgaatgtgtcccctcaaaacttcaggtgttgccaatgtgacagtatcaagaggtaacagggcctttaagaggccatgaaggctactccctcatgaatagcagtaaggcccttataaaagaggcttcccacagtgttcagttagcttgatcttctacctttctgccatgtgaggacacagtgttcctcccctttagaagatgtggcatcaaggtaccatcttggagacagagagtagccctccccagacatctgaacctgctggtgccgtgatctcggacttcccagcctctagaactgtgagaaaacaaatttctgttcttgataaattacccagtcctgggtatgttgttacagcagcacaaaatggactaaggcagtggttctctggaacaactgccaatagtaagtaggaatatcccattgtcccacccagggtctaggtgagtacggacagtctcagggcttgactgagcactgagctattttctctctggactatcttactatctgtttggctggcctgctacagagcttctgggatctgggctctccctttatgcattcggcatcttccagaggccaagcccagcccggactccagctagctgtctggaggccctagttcagacaagcctctttatcttagggcttgaggcctggcttctgggatccctcatgtcatctggaagaaggatcctgttggctttacaacctcaatacccacagacaataaagactgggtccactctaagaatcagttgtcaccctccaccttgatccctgagaaaattcccttcccccaccctctgcatacacacctcctttggccattactgtggccttattttgacttgattttttcccccagtctctgaagctttgtgagagttttggctaagacatcatctccctagcctccattcctggtttagacccaggctgatttacttctctacatggagtccaaacatattaaaaatctaatgccctgggctaccctgattgtagtctgctcaccctctagatcccggttaacttaggaagactcataaaggtgcttttagtctaatgatcgagttaagttgtccaaatcaagagtcaccagactcccggggtattcattgtccattcaacaaatatccactgagtgtctgctatgtagtcagcactgatggtggcatttggtgttagggattcagcagtgagcatgacagccaaggttcttcctctcaaggagctcgtattctgctgcaggaagacaggcaatacatgaataaacaagtaataataataataacaataataaaaccattggtggtcagcctcactcagagaagtaaaataagctactgcggtagagaattgtgtagccagagaatactcctctctgttgattttaagctaaaatctgaattacaagaagagttccaggcaaaagttctgggttgggaacagaaagaatgccaatgttgtttttaaaaacaatcttttattttagaaatagtatattagtttcctagagctgccacaacaaaataccacagactgggcggcttagacaacaggcatttattttctcagcgttctggagtctggaagcccaagatcaaggtcctggcaaggttgggttcttctgagaactctctccttggcttgcagacagctgccttcttgctgcctcttcacatggccatctctctgtgcacagacaccccggtgtttcttttcttttaaggacaccagacatattggcttagcgccctaccccaatggcctcattttaacttaatcacctctttaaagcccttatatgcaagtatggttctattctgaggtactagggctttagaattcaacatatgaacattgtgggcaggggttgggaacagttcagcccatgataaatagttttagatgtaaagaaaatttgcaaagataatacagaaagttcccatatatcctgtacctagtttttcctattattaacgtcttatattagcatggtacatttgtcacaactaatgaacaaatattgacacattattattaactaaaattcatactttactcagattttcttcatttttacctaatgtcacttttgtgttttaggatctcatccaagataccaacattacctttagtcattatgtttcattaggctcctcttggcagggacagttcctcaggctttccttgttatagataaccagtttggagaggatgggccagctatttggagactgacaagcttgtagaatgtctcagctgtgatttgtctgatgtttttctcatgactagacccgtgttatagattttcaggaagaagaccacagagataaagtgccattctcatcacgtcatatcaagaatgcatgatatcgacatgatttatcacgactgatgtgaagcttcatcatctggctgagggagtatttgccattttcctcattgtaaagtgactccttcttttccgcctcctttttcgactgtacttttcaaaaggaagtcactatgtgcagatctattcaaagagtgggaaattatactccacttccttgatggtggagattctacacaaattatttgaaattcttctgtgtgatagatttgtcttcttccacattgatttttcccatcatttatttataccagtatagattcatggatgtttactttatactttcagttataatcccatgctactttatttattttgctcagattgtcccagctttgaccttaggcacttgttcagttggctcccgtgcccttttgacatacccctattattatgggagtttttttgaatacttccttaactcttgctgttacaagatatttcaggctcctatatttccccccacccagccctacaatcagccacttccttcaagaagctatggttgtttttactggagaatggtattagaaaccaaggtctgggtcccacatgtgttcattgttgctgtagtgtcatttctaggccctttcaattgacagagcaagggaatatatacatgaatgctaacctaccacataggttagcatatgatactttttaccatatagatactttagcatatgatagtttataccatatgatactttataccatacacttttttcctatacacaaaagtatctataacattgatgtatatgcatacatctatatctatattaagctaaacaagagttcatactgatgttttcaactccaatacatcaccacatagaccactctagcctactctcctagcttcactgtaacctccacttcaatagtgagaaacctgcctcccaccatctacttatttaatcattcagttccaatatatcatatgttgtttcagaagtgtttatctgcaccccccttaggaaaaaactatcaatcagagtacaatgcttaaatacgactgcttttgccttcagttttgcagtctctatgcattttcaaagttacttaggtcggcacctttatcgcccaattccttcagtgaggtaatttcatctattcgtgatagttagattcttttgtcacagtctgcattccttcttgggatcctctgacctcctaaatattttgtttaaatttccacacattaaggtacattctttgtgctgtaaaactccattgattttgacaaatgtagtgtcacatattcacctttagggcgttatacagagtatatccaccaccctaaaacatccctgtgcttcgcctattcaatcctcctttcctcccaaatccctggcaaccactgctctgtttaccatctccaaagttttgctttttatagaatgtcataaaaatagaatcatacaatatatagccttttcagaccagctagaatacctatgttataatagagaggtaatagtcaacaggttaaatgttgctgaggggtaaataaatacagaagagtgacttcaagttgattatctcttatccaaaaggcttgggaccagaaaggctttgaattttgattttttggattttggaatatttaccttgtattttgctggttgagcatctgaaatccaaaaaatatccgaaacccaaaatgttctaacaagcatttcctttgagcttcatgtcaacactcaaaaagtttcagatagtggagcatttcagatttcagatttttggatttggggtgctcgatctgtgctagatttggtaacatggaaaacagtattagaggagggtgaagatgtaaaatatcatttggaaagtgaaaagcaaacacactagggaagacagagaagtgtgctgggcagtggagtatcacttgataatccatggtcaagagtttcaagagggaatggtcagcacccccatgtgttttactccagtgatgttcagctgctgcaatgcaggcacacagtagttgggtaaatggatttaaccagggcagactttgccagtcaagtttaatggaggataagatgggagagaatgtaatgggtagacatacagatgcaattataataatggaccctgagatctgagttggtttaagagggaagtaatgtatcaggaaaacacggtggggtccacagatgggatgagttttgataaagtcaggaagtgggggccagaacaggaggtggcactggagtagtgggctacttgaaggtaagatcagttattgctgatgacaggtcaacagtgtggcgttgagaatagatggttcgcatggggtggaggagaatatattgcaaatgcggagatcaagaagccacaaagccatgaaaatagatggatggtgatatcatcaaatatattgacaggggttgagatggaaagaaaaggatagtaaccaaggtgctaaaattaactgtaaatggggaggagtagccagaggattcatacatattttaacaagcatggataccaatttctgtgttccttgctttgtatgaaaaagtcaacatacctaattttcagacatgattaggcatccacttattatagcatagcctacacaaaagaggatcacaagacaaggttaaatactttgctcctactctttcaaatatactatttagatagtgtatcagagttctctaaaaaaacagaaccaacatgagatttattttaaggaattggctcatgcgactgtgggggctggcaagtctgaaatttgtagggcaggccagcatgctgaaaactcaggcaggattttatgcttcagtcttgagacagactttctttagtttttgctcttgaggccttcagctgattggatcagacccacccagatatccctgggtaatctcctttatttcaagtgaactggctagtgatgttaaccacattacaaaataccttcacagcaacagctaggttagtgtttgataagtaactgagcagtatagctccatcaagttgacacataagactaaccatcacagatggtataaatggaacagcaaacacagaacaagacagctgttgcagctttctgcaatttaatatggcaaatatagattctggcagtttttgattagaggacattcattatgacatggaaacaccactagattatattttcctatacacaaaagttagcttttctttagcatagtaagacatcctcaaagactatctctgaaagttttaaaaacaggccaagctgacagagttttaaaactttcctaaaaggtgacaggtattagcacagcacaagccaagtctagaagtaataaagttgatctttcttacaggcaactattttagttttcaatgccaatgactcaagagtgagcgtaggaacataaccccagacacagaaggaaaacctgatcatgaccatggagcagagttctggaggaggaatgctcaaatcttaaagagcttcaaatcataaagtacatcacatgttggccaataagcagaaggattattacaataatctatgcaacaactgaagtctcactgtatacaacaaaaggtcagtgcctttaggtgtgcaaatttatttccttgagctaaaatagattgtaagcaacagtgaaacttgcccaactaacttgtgaatcacttaaaccagctgtttatgtcatttagctaagtagccccaaataaggaatgcatagattccttatttagggattaatcttaacaaagattaagattctgtgctgtttagggattgccctgtgaagggaggtgcccatggaaaggctccttcagaggcaccacacacatggccatatttgccctagcctgtggggaattagctagaattctaccatgtgctacagacaccagggagagtttaagcaaaccacaccagaagaggaaacaaagatctccaatgagaccctaatagcaatttcattaaataaattttggaatgcaatctcttcaagagtggctatggaaacagaccagatctctttgctgtctctgaggccatgcctcgtcattctcttctcaacttcactcctgctggcttcccaagttcactaggagcatcctcttttgcagatatctagccctcattatgtttcttccagctctatggaaagcagggtcaggataagcagaagagcagaccagcatgtgctttctgcctcccatggctctcattgtttcctatggactgataaatacaaacgggttttttccgagtttcgttgtggacagggtcatcccttgtcatcagagtgctgtcacacgtagtagtcatttgtttattcttcttctttcagctgtcctcctcctcctcctattatgttcttgcttgggctgagtatcacagttccttagcaaacatcagggacaggcatatttgccaagatccaaggataaagcattttggaagaaagccgagaaaatggtgtagccactgaatttctgcttctttttatttaacagaactacagaactacttttagtcattatcactggattaaacacacacaaaactgattagttctggttgttattcattattctcccacttcttgtttctaaaaaatcagcattacaaacaactctccaggatcttattccaatcaacctatctcaagtcttacaattaatattcctaatataaccactacactgttcgacttactttttttttttttaagcaatgaaaaccaatgccaatgaatcatgaatctctacaaaaatagaggccaaagaggtgaaccggagagcaaacttgacattggaaagcaagagcctcccttgccttcccctgttcactaaagccagtggctctggttaacgcaggaaacacagtaaatacacagtaaattgtacacacaaagcagccatcggcaatttgcctggtggggttggatagcatgtggctgataggtctcaggagatgaggaacaaacagccatgatggattaagtgattgctattggctgtgtgcttgccctgaatatttcaccatggacagtaatcaattactagagaccagtaatgataccaatcaaatgcacttagcacttctgcactatcaacctgagggctgccgacctgccacttagaaaaggtttgggctgtgtgagaaacgatctgtgagctagccactgttcccactgtagaccaggcagaaaagcaggctgctttttcttcgtgttaaaaagataaatggataaattagccactcacctgccctacattaaggtttattttaaaacaagcaatagtatccctctccctcactcccagagggaggacagtttataaatattttggcatcatacgacgtctcctggtcagcagttttttgaaagcaaacagcctcaaagaaaatgactgggcagaggccatggtaaggcagaaaaacagatgtcgattgtttctgaatactgctggtcaccatagcattgggttgttatgatgtcacttctcatctttttgttctgtggtgggaacgccgtgcgtcatcactgaatgttcagaatgcctctatcttatgccgttctttatggtgtccatgagaagttgaaaaagaaaaatcagcctctctgtgtttctagcatgtcaaaatataaacctgttccttctcttcttggggtgtggcatctttgttctccctgcggtcatctccatttagaagatgatactgtgtgggagttctcggcatgaatcacagagctgtcagtacgtggagtctggtgcaccttcccgcctggccactttgttcagcacaagtctttcatgaaacagtggactgtggctgggccccgtggctcacacctgtaatcccagcactttggaaggccgaggcaggtggatcacctgaggtcaggagttcgagaccagcctagccaacatgatgaaaccttgtctgtactaaaaatacaaaaaaattagccaggcatggtggcgggcacctgtaatcccagctacttgggaggctgaggcaggagaatcgcttgaactcaggaggtggaggctgcagtgagctgagatcatgccactgcactccagcctggcaacacagcaaaactccgtctcaaaaaaaaaaaaaaaaaaaaaaggaagaaagaagaaacaagaaacagtataatcctagcactttagtaggccgaggcgggcggatcacctgaggtcaggagttcaagaccagcctggccaacatggcgaaaccccatctctactaaaaatacaaaaattagccgggcctggtggtgtgtgactgtaatcccagctactcgggaggctgaggcagaagaaacactgaatcctgggaggcaggggctgcagtgagccaggatcgcgccactgcactccagcctgggcgacagagtgagactccgtctcaaaaaaaaaaaaaaaaaaaaaaaagaaacagtgaactgtcccaccattactactttgaaggacttttaggcttaacaataatgggaactaattgaaatgggggaaacgccttagaagagttgtcccacacttaatccttgaggtgtattttttgctgggttttaacagtttttccagacaagcaaaaattcccgtttcatgagctggagagcacagaaaagtctaagttcattaaacggtgccatccaactgccatttacagatcacttcagttctttagttgtcccatcgtaaacttatatacaacagggacaggaaggggcaaaagagggcatttaagagagtagaaatatttgcatcttgactggggtggtggttataagggtgtatgcatttgtcagaactcaaactgtgtacttaaaattggtgcatttgttgtatgtaaacttcatctcaataaaattgaggttaaacactctggactaacaagcaactcccaattaacaagcaagatcactggctgaggaagtgagaaggacgtgtccttatcttacttacccctgttaaacagggggcaatcactttcaaataccacacattcctgaaggaatcaccctgctctacccctgctcagcatcattgatggaagtgactgctcactgttgaacctgcttcttctcttgattcctcgcagaggcagctgctggctacagacttactaaattgcaagtcgcctcagttggcagaactgccccttctcgacgatttataaactctgtccatcgagagcacactccagagacagggctctggacgggacagaagcaggaatcttggccaaggatacaaagcttccagaactaccaaaggcattgtccgccaataaaataccactctgaatggactcattcatgtcccattaacaaaagtgttgctaataataggtgccaccttacttatgctacaagggcactgtaagaattaatgaaataatgaggtctctggagcacttgcccagagaggcggccaggaaaatcagaaccatcggcctcccctgcggcagcatctaaggatgaaacacgcccgacggcttctgctgccttctgcctgatcttcctccctattacccgtatcatgcaaatctggacaaagtttttgttgaacttgccactgaatgtgtctaacctttcagctcagccatcttcagtgtgggatgctatgactcacggtccatgagtcatggagcccacaggaatcacagtgaagcccagaaatgctgcctgcttcctatcccacatgcaacaccaagccattggtgaaaagcctcctcctgtttgtcttcctacccaggtgtttttgtcaggctacccttcttcactgaaagccaaggcctttaaaggattggatagcagcagggaacacgtgaatatattcatgccgtagccagtaatttaacaattttattcatccagtctctgcccttggtaccactgctgacccctgcaccccaccacacacaaacaaacacacacacacacacacacacacacacacacagagagagagagagagagaaagagagagagagagattcacttccatcacttccagaataatttaaatattttaaatattaagtatctttaaagtatattgtcaggtaaaagaaaaaaatcaggactgtaagaaaagaaataggatggaatcagaagaaattaattgttttgttttgacaaagtaatcttgatttttttcacttttcacatttttcagagtctgaagtattgctgactacaacctctatagagtcatacagacaacctcactatagagaaatctttacatttacttgagaggcttaaaataacatgtaagaaaatgaagtgggcttcattcctgggatgcaaggctggttcaatatacgcaaatcaataaatgtaattcagcatataaacagaaccaaagacaaaaaccacatgattatctcaatagatgcagaaaaggcctttgacaaaattcaacaactcttcatgctaaaaactctcaataaattaggtattgatgggacgtatctcaaaataataagagctatctatgacaaacccacagccaatatcatactgaatgggcaaaaactggaagcattccctttgaaaactggcacaagacagggatgccctctctcaccactcctattcaacatagtgttggaagttctggccagggcaattaggcaggagaaggaaataaaaggtattcaattaggaaaagaggaagtcaaattgtctctgtttgcagatgacatgattgtatatctagaaaaccccatcgtctcagcccaaaatctccttaagctgataagcaacttcagcaaagtctcaggatacaaaatcaatgtacaaaaatcacaagcattcttatacaccaataacagacaaacagagagccaaattatgagtgaactcccagtcacaattgcttcaaagagaataaaatacctaggaatccaacttacaagggacgtgaaggacctcttcaaggagaactacataccactgttcaatgaaataaaagaggatacgaagaaatggaagaacattccatgctcatgggtaggaggaatcaataacacgaaaatggtcatactgcccaaggtaatttacagattcaatgccatccccatcaagctaccaatgactttcttcacagaattggaaaaaactactttaaagttcatatagaaccaaaagagagcccgcatctccaagtcaatcctaagccaaaagaacaaagctggaggtatcacgctacctgacttcaaactatactacaaggctacagtaaccaaaacagcatggtactggtaccaaaacagagatatagatcagtggaacagaacagagccctcagaaataaagtcgcgtatctacaactatctgatctttgacaaacctgagaaaaacaagcaatggggaaaggattccctatttaataaacggtgctgggaaaacaggctagccatatgtagaaagctgaaactggatcccttccttacaccttatacaaaaattaattcaagatggattaaagacttaaacattagacctaaaaccataaaaaccctacaagaaaacctaggtcaccaaactatttctaataatcatgaatcaacatgtgctgaaaagatgttgaataagaatagtatttactaactttaaatggtaatactaatatcatttaatacatatttccaacataaatcttgttcttgaaaatattattattgaaggttaaaaagttacttctgtgccaatagattttcttttgaaaaaaattgttttactgaggtaaaatttacatataaagtccaccaggtcagatgcagtggctcacacctataatctcagagctttgggaggctgaagcagggggatcattgagcccaggaggtcaaggctggagtgagccatgatcatgccaccgtacttcagcctgggtgacagagcaagatcctgtctcagaaaaacaacaacaacaaaccatctattttaagtatataattaaaaaaaaaatttcaagtgtacaattcaatacatttgagagctttgcaatcatcaccacaatccagtttgaggacacttccatcacttcaaaaatgtctcatcatgcctgttagggtcaatttccactcccacaaccaatacaaagcagccccagatcaactttgtgtctccacaaatcggccttttctagacatttcacacaattggaatcatataaatgtagttttttgtatctggattcttttaactagcataattttggggggtatccatcttgtagcaggcattgagttccttataactgctgtgaagtactccatcatatggctgtatcatattttatttactagttgatggacaacttggcttgtttccagtttttagctaagaatgattctgttatgaacatttgtgtatgtttctgtgtggctatattttcatttctcctggatagattccttagagtgtcatggccttagagtagcatggctgatccacacggttaagttttccttagagtttaaagacgttgtcacttttttttcccaaaacggctgtgccattttacactcccaacagtaatatatgagaatttcagattccacacttttaccaatacttgttattgtgtgtctttttttgttttgtttttgtttttttgagatggagtctcactctgttgccggagtgcagtggtgcgatctcagctcactgcaacctctgcctcctgggttcaagtgatccttctgcctcagcctctcgggttcaagtgatccttctgcctcagcctcctgagtagctaggactacaggcatgcaccaccatgcccagctaattttttgtatttttagtagagacggggtttcaccatgttggccaggatggtcttgatctcttgaccttgtgatctccccacctcggcctcccaacctgctaggattacaggcgtgagccaccgcaccgagcctattttgtgtctttttaaatacagccattccagtggtgtgaaattgtgtctccttggattttaattcacattcccgtaactagtaatattgagcacatacttcatgtttatctgttttggtgaaatgtctatttaaatcttttgctcatttctaattgaattgtttatattctaatatttggctgcaagagtgtttaaaatatagacatacagggccaggcacagtggcttatgcctgtaatcccagcactttgggaggctgaggcgggcagatctcttgaagtcaggagttggagatcagcctggccaacaggatgaaaccccatctctagtaaaaatacaaaaattaaccaggcatggtggcacacccctgtaatctcagctgctcgggaggctgaggcaggagaatcgcttgaacccaagaggtggaggttgcagtgagctgagatggcaccactgtactccagtctgggtgacagagtgagactccatctcaaaaaaaaaaaaaaaatagacatacatatatacacacatatattacatagatacattctggataaaagtcctttatcagatatataatttgcaaacatttttctcccagtatggttcttttcttttcttttctttttcttatcttttccttttcttaatctcctcttctgatactcaaaagttcttaattttggcctggcgcagtggctcactcctgtaatccctgcactttgggaggccgaggagggtggattgcctgaggttgggagttcgagaccagcctggccaacatgatgaaacctcgtctctactaaaaatacaaaaaaattaactgggtgtggtggcgggcacctgtaatcccagctactcaggaggctgaggaaggagaattgcttgaacctgggaggcggaggttgcagtgagctgagatcgtgccactgcactccagcctgggcaacaagagcaaaactctgtctcaaaaaaaaaaagtttttaatttttataaagtccaacttaccgatttttcttgtacagattacacttttggtgttgtatctaagaattctttgccaaaacccaggtaacaaagattttcttctatgattttagatgtttcatagttttaacttttacactgaggccaaatatacattttgaattaatttttgtgtttcatgtgacatgggggtctactttttttgtaatgtggatatccaattgttcctgatgaaagacaatagttttctccattgtattgtcttggcatctttgctgaaaaccaactgaccataatataagcatttatttctggactcccaaaattctgtttcattccaatccatgaactggaatgtctctccatttactaagatcttttatttctctcagtcatattttacagttttcagtgtataagtcttacacttctattgctaacttagtcttaagtcttttctttttaaatattattgggaatggaattgggttcttaatttaactttcagattgtttgttctttataatagaaatgcagccaggtgcagtggctcacgtctgtaaccacagcactttgagaggctgaagcaggaggattgcttgaggccaggaggttgagaccaggctgggcaacatagcaagactccatctctaagaagaaaaattggtggagtaaggtggtgcatgcctgaagttctaggtacttggaaggctgaggtgggaggatcacttgagctcaggagtctgaggttactgtgagctatgattgtgccactgcactccagcctgggcaacagagagacacccagtctctaaattaaatgaatgaattaattaattaatagaaatggaacgtttttgtatattaatcttgtatcttgcaattttgtttaactcacttattagttttaattggtggtggtggtggtgctggtggggggtgtgtgtgtgtgtgtgtgtgtatgtgtattccttaaaattttatacatacaggatcaagtcacctgtgaataaactttccatttttgattcctttatttttgccttattgcattgtctagaacttctagtataatgttaaatgtaagtggcaagaataaacaccctttactttttccctgccttagtgggaaaccatatcatctttcatcattatatatgatgttaactggggggtttcttatagatgtcctttatcgggatgaggaaattttctgctattcctatttgttgaagtttttatcatggatgggtgttgggttttgtcaaatgattttgtcaaatgatttttctttgcctaatgaaatgataacatggtttttgcccattagtctattaatacattatgttacattgattaatttgcagatgttaaccaactttacattaatgggataaatcccacctgatcatggtgcattatcttttttatatttcaggattcaatttgctaatattttgttaaggatttgtgcatctatgctcatgaggacattcttgtaatatcattgtctggcattagtatcctaagttcagaagtgttcccttctctattttcagaatggcttaatgaaggatttatatatatatgatgcaatccacaagtgaagccatctgggcctgtgcttttcggtgtgggaagatttttgaatactaatttgatttccttacttattatagttctatcctttctatttcttcctgagtcagttttggtgatgtgtatcttttaggaatttgtctgtgatttaatttatttgatttgttggtgtgaggttgctcacaatactaccatataattattttaaattctgttgggtcagtagtatggctcatttttcattcgtgattggctaaattgtgtcttttgctttgttttgttttggtcagtctagctacaacttttggtttcactgattttctctattttttttcttttctattttattgatttctgctctaatctttattgtttccttctgcttgctttgagtttcatttgcttttttctagttgcatatagtggaagcttaagttatttacttgataccatttttctttctttaaataggcaataaaagctataaatttccatctaagcactgttttagctgtatcccataatttttaatatgttgtgttttcattttcattaagttcaaaatattatctaactttttcttttactcatgggttattcaggagtgttgtccaattccaaatatttctattattgatttattatttaattacattgtggttggagaacatatttcatatgatttcttttaaattcattgacacttgttttatggcctagcatacagtatattctgaagactattccctgtgcatttgaaaagaatgtatattctgcaattgttaaatggattgttctatgtatgtcagttaggttaagctggttaacagtgttgttcaagtgttctatagcattggtgattagagaaagccctgctttctagttatcctatcaaatagtgagagtggggtattgaaatctttgactagtgttgttgaattattgtctatttcttccttcagttctgtgtgtttctgtttcatgtttgaggctctgtacttagtttaatatattaataaatacatagttggtgtatattcttgattcattgatcctttaattattatgaaatatcaataattatgaaatatccctgtctctagtaatagttcttaaaatatatttttgttgatgataatgattagtatttgcatagcaaatgattttttacttttttacttttatactaatatgttttgagtcaaaagtaacgtttctatggacagtatatagttgtatcgtgtgtgtgtgtgtgtgtgtgttttaatccagtctgacaatgtctgccttttgatttgagtggttagaccattcacattaaatatattattgggccaggcacggtggctcacgcctgtaatcccagcactttgggaggccgaggagggcggatcacgaggtcacaaaatcgagaccatcctggccaatatggtgaaaccccatctctactaaaatacaaaaattagccagtgtggtggtacgtgcctgtaatctcagctacttgggaggctgaggcaggagaatcgcttgaaccaggaagtcagaggttgcaaagagccaagatcgcgccactgcactccagtctggtgacagagcaagactccgtctcaagaaataataataataataaataaaataaaataaatttttttgagactctgtctcaaaaaaatatttatatatatatgtgtatatatatatacacacacattatatatatacataattgatacagttgggattttaaaaggccattttggtatttttctatgtcacttttttttgtagttgttcctcctttactgctttcttttgtgttaaatacatattttctgactaccagtttaattcctttaattccattttactaatttttgagttattttcttcatggttactctgaaagttacaatatgcaccttaacttatcacaatctattgcagattaacacgaacttaatttcagtaaaatatagaaaatttgctccaatagagctccattccctcccaccctctttgtgctgttactgtgatatatattatatgtcatatacatctacatttgctatagacttaatagtagagtgttaaaattattactttatatcatttcatgtcttttaaagaaggtataaaaataagataaatataattatatagtcacttatatgaacccacatatttgccattttcagtgctatttcttcctatggattccagttatctggagtcatctttttagctttaaggatttcctttagtatttattgtaagaaaggcatgttaacagccatttttctgtttttgttttttttttaaattcgggatgtcttaatttttccttcagttttggcaggatagtttggttaggtacagaaggtacagaactcttagctgatatctttttcttttagtattctgtcattcttttttttaaaaatgagaagccagccattcatcagactgatgctccctatatgtggtaagccatttttctcttggtgctgtcaatgtcttctctttgaacaatccgactatgatgtatctagatattaatcctacacagagttagttctatttgttgggtgtgtatattaaggaatttggggagtgtttgactatatttcttcaaatattttcctgctcctttctctgtcttctcattctaggattcccattatatgtatgctagcatgcttgaaattgtttcacaagtctctcaggctctgctaatttttcaatcctttactcctttgttcttcaaatttgataatttctattgatctatcacattagctgatggtttcttctgtcttgttgaatatgctgttggaccacctaatgatttttaaaatttaaatttttatacttttaactccagaatttggtcctttttaattttttaaaaatagatttctgttttcttattaagattctctattgattcatgtttgattgattcagtattgttatactttcctttaatgctttaaacatggtttcttccagatcttgtcccaagctggtctgcctttcctcaacctttcaaagtctttttatacttgttttatacataatgttgaacacatttgtaacagttttgaagtctttgtctgaaagtccaacatctggggacactcagattctattgacttctcttattcctaagtatgggttacactctcctctttctttgcatagctcataatatttgttgaaaatggacattaaagatgatacaatgcagcaattctggattctggtatttttcccctgaaagttgttgcttctgtttttgtttatttctttagtaactggcctggattaattctgtgaattctgtctccctggcagtatgaggtcactgatgtctcttctcagcctttaaaaaaaaaactcttcttttcatttttaatcctggcttcctatttgttacccctgtttctgcatggcttaatggctggccaatgattggacacaaattgtgatcaaacaccttgagccaggaagacttccattctctgctgatggatctatctgcgggtagaggtgcacactctaagttcaggccattttcaagtagatatcagcctatgctttccactagactcttcctcatctcttcgatgcatgtgctcagcctcaagactagataggagtgtgtagattgcttgggctctctttgttgtctgctgcatacgtgggcagcctcatctggggatatgcttactccaaccacaactgcaacctcaggaaaatagagcccactggccatacccaacccacagccaccaagatcattatggccactgacaatgccactagtcatgagcactgtccaccatccaaattgaatgggcctttgacagcagcagcaacctgcctgtcctttatggactgtggtcctctactcctagaatctccatgacaactgaactgcattagggatggatgcaaccctaggcaacaattccacagattcccactgttctaacaaaagttcagcagtttttctagtataaatgcttccccgattgtcgtatgccttattcaatttccaaagcactgaagtgattgtttttgttcattttgtccagccttatatttgctttcttaagaagatttgttgacttccttacttggctatagctggaagtcccacccaacatttatttttaaatgctggggatactacagagaggcttggcagtctagattattgacatcccatccaatataacttgtatagtgtcaaatgtcatgcagttatttgtaggtgtgataaaacatttgtctttttgagtgcttaagaaccaactcgaaactgtggattgttttcttataagggaataaaaacacaattgataaattaaagatttaggttaagccatttggggcctcagttctggatatacattaagaactcagtaaatgacccacgattcacagatgtggattaccaggtacatttggggaagaaatgtgcttttccccctatttctatgatatttctgcccactatgtttcaccaaacatgtataccaagtgtgtcatatgaagaatatgattaatgaccgttttttaaaagtctctcccccaaaacatccaattataactaattttactttttggaatgatctttctcttcaaagtcacaatgggtttttcagttaatctcaggcaagcatctgattgagatgttgctaaggttaaacagcaataccatttgattaatatattaaaactgtcacagtcatcttcatttacctcagtaaagactgttcattactttcaatggctctttattgctatctgactaaaattatgagataaaaagagccagcaaagcagtagaagatccataacctctattcccctatccctgaagaaaaaaaaaaacaacacagcacttcctatggcatgattcaacctgggaataaaaagagctttgccatcatcaactaaaactcaccacagctggtgaagttaaaaatcaatactagctccttaaaggcacataaacgtacttgcctgagatgatgtaacaaattggttcaacaaccagaaaaatggcccagaatgacctttaatcaccacagcccagtctccctctacttacatcaaaaccaaactatagggccagttacccaaacctttatcccagcccacttcttgagaattttcttcctaaaggagaagaagaatggcggtggggaacgggacaaagattggctcaatgatctagctgtgttaataacaccctcaattgaaaaagaacaaagacttaagatttggccttggctgggtgcggtggctcacgcttgtaatcccagcactttgggaggccgaggtgggtggatcacctgaggtcaggagttcaagaccagcctgacccacatggagaaaccccatctctactaaaaatagaaaattagccaggcttggtggcacatgcctataatcccagctacttgggaaggctgaggcaggagaatcacttgaacctgggaggtggacgttgtggtgagctgagatcatgtcattgcactccagcctgggcaacaagagcaaaactccgtctcaaaaaaaagaaaaaaaagaaaagaaaagatttggcctttttttgctttaaatgcaaagcaagtatgatcaaagaaccaaatctcaaactatcaaaacatagattgattttgctgtttcagcctggaatggaatagatgtgtgttaaatttgcaacatactactccagttttctccatgagcagttgcagttttagccacgttcagttcttaccatgttaaaacacatttgcagagcttcttctctataatgaaaccagtttgaaggctccaaattgctttcttatgggagatgttatcccatatatcctgataactgttacaatattcatttaaggaaggtagggagcaggtattataattccagtaaaagaagagccaagtgcttaaaacatacccccaagaggtctcagagttaataagtcgcagagtgagaaaaagtcaaagttgttggggtcggcacagagctgtgtttaagacaccgagctggccctgtcctgggtcaccacttatgtaaagaacagctcaaaatcagaagggacaaaaggccagagaaataatctgcttgtctgcatgtccatacacacaggcatccaccaaaggttttattttgtgtattaactaacccaacaatatttcccagtatatccagatgattctataaaaactgtgagtctatccccaggtactgtaacttgtttggataatgaaatgtatctgtacttcacaaaagtttacctctatttaatcatatccttggcctaacaaatactgccagtctatactgggaggctttttactttttccttttcaaaaaaacaaaccaggtttacacagagactactatgcttttttcaaaggaaagatgaaaataattcaaatgaacagtattattttaaaattaatttttaattcataaattaaaattgtgtttatggtgtgcaacatgttttgaaatatgtatacactatgcaatggctaaattgagctaattaacatatgcattacctcacacacttatcatttttttttgtggagagaacacttaaaatctactcttagccattttcacgtatacaatacattgttaactatagtcaccacgttgtataatagatctcttgaacttattccttttgtctaattgaaaattttgtatcttttgaccaacaactctcaccccctcccaccatactcccaactcctggtaaccatcattctactctctgcttctaggagttcaacttttttagattctctatttaagagagatcatgcacatttgtcttcctgtgcctggattcttcttatttttttctctacctgatgtctgccctgtttaacttataattacattttgaatagatgtaaagtctgaaaagttatttccattgaggtctgaggtggaagcaaaagcagaaaacacaaatatgatttttaataagtcacgatgggaaacagtaagactggtcaactttctatcaaatttattttcatgatacatttgtaaatgttcagaagacaataatggctttaaattccaccatactataggttctaaatactagccttataatcggaagatctaggacttgtcatcattaactacttattacgcagcaacctcccactgcctaacacagtatcatttatgtggctgccctcaaggataatatgccctggagcagagtcacaatattctcacaccacagaaaaccaaaacaatatagtggcaagtaccgcttgatttgtttactaggtatacccagtccaagttggcagaaaggaaacttgtgcatattaaaattcattgtccacttacacagtgacccttgtactgcagaattcccaagggacctactttaccagcagcagtggttccccaggtaggcactggcagggtctgttggaaccatgcccactacggtggcaggaaagtaatggcaaggacaagcacccagctccaaagtcagactaacaatttggatgtccagaagtctgaggcttttaaaacaattcaacttggtggatggttcaatttaccacttctttctcaaaattcctctctgcaaatttctatgaagatttagggttctagagctggaaggaacttggcatgggagttaatcagtatcatgaactgttgatggcacgaggacttcacctcctgcccccaggccagttctgcttttactacaccactgggttggggtgcatttggaagtgacagcagcattgctcctttgtaaacatggttgggtctgggttacctaagggaaaattctagagggagctctcggacaaagttccagatatactgggagaaaagtacctagtaaaagagaaacacaagacactccttgggcataaggagaaaaagaacgaaatagtattggggggtaataggctaggggacagtgcaggaaagacaagcagacatgagaatcctggcatgtcaggggccaaggatgatgtccttgaggccaatatgattcaactcgaatagctgagaagggctgcaagaaatacagtgtcctatctcactggctttgtcacaaagggttaacactagacaattttctttttctgtgctttcgtgtaccccattttaaagtgaggataataacattttgccagcaacgtctgtcaaaggggactgagatactaacatgtgcctctgaaggagtcttgaaagagcaccagattcaagtcctagctcagctagaactctgtgtcctaggaaacatcccaaaacatcccttaagttcagtttccatgtctgtgacaatcaaggattgggctccttgaattaagtctgccccaggtatatgatttccatacgtgaagtgctttaagttcccacaaggaaagtttctgtgtaaattacaaatggctttaagagccctgtcaactcaaccttcctcccattcctgctctccgcacaagcaagagaatcacttagaaagcattgtaagctataggcaatgggaagaaaaggagagagactgcacacaggcactttaaggtaaggctgcaccaagcccttaatgctttactttgcacgagacagaatgtggattagcgtgtttatttcagaagcctttctgaacaccatacctggctatttaaattcacaaggcatttgttgtcacactttgtctcatattaacaatggcacagaaggcactggcagttctctcaatattctcaccccagaatattggtggatgggggtattactcaatggcacagtttctttacttattatgaatgtgctagggaaggaccatttacccccactcccctagcacccagtatttttaactaaaagctgttacttcaagaacgtaattcccagatccacacaggggcactgtcagttttaaaggcatcgcatcttgtttcctcacttctttgaagctcataagaaacctctccttctgagcgtctacttcacctaaatgatctcaaattccttgaatcacaaaaccagtaagaaagggaggggtttggggagggggcaggggagagtagtgaggagagaaagaaagaaaatgggatgaacagtggcttagtgcaacgggctgcgagtgtgtgacacaagatacccaccgcagacaaagaacgccatgagactcgcagggagacaatgacggctccaggaaaaacgcagcgctcacggggctggcgagggagcctggcgcagctcccttcccagacccgctctccctgccagcccagggctcccagcagctgctccccagtagagagacacatggtcatttcctagccgaaaggagggctaccgttttccttaggttttttttttaacataagaaataactcctccctatcatcatattccccagatatagctgtattttcaactaccaaaaaccaaacagaatgatttttgtttccttaagagtttagaaattcttgtgaaacaaaataatcaggaagaaaacaaaagttcagcaaagtagctaaaatctgtacttcaaaaaacacaggtagaaaacattttggttaagtgtgctggggtgctggtgaatgtggaggacgggctttgaacaatgcagtgggttaactcagtggtgttgctaccctttgtcctggttagttcaaatggttaagacaatgcagagggctaggatttttcctgtttcacctctcctctttcccagaaactatctggagcaggttgattcactagagattcctaatcctccttggcagaaagagaaatgtgaatttgacaaataatatgcataaaatattccttaacctggaaacattaggaggaaataatcaattcagaagaactgaaataaaaaactaaacatagaaaagtgctgctgccaggcagctgtcctccaatgttggaaacatgatcaccacaggactagatctgtttaaaaccactatctgtttacaaacaaagcacttactaaataacgctccaggtaatggatgatgacaggaatagggcttgctcttttaaataacaacagattggaaaaatatttcaataccatcagacaacaaattaaaatgaaacatcttttctaactggaaaaatgcagatctagctgggaaaattgatttctacccatcctccatcctcccaaaagaagattagaaagagaaaactgaaaatcatacatcctggagatgaactttgttaatgagcgccataaacattcacagggagctaggctcctatttcataggtttttgaaaaaaatattctaatatgcacacgtgagtcaaacagactgcagtaaaatgcatctgatgtttaattgttttaatacactgcaagagggagtgaagccttgtcactcaccagatgaaatctgatctctctcaaatcatctcacccaatagtgttaaagacattactgctgtgacataattcaacctcaagacatcttatgggaaacataggtcagttttaaagcaccaggtggataaacagacattcattattcagtctcctgaccttgaatttcgggggttctatagtcatcttttgtttggaggctgccacttgagatatcgtgtgccatgcaagggctttccagatttaagtggactttatcgagtaagatgactcttttttatgagaacacataagatgccaaaacatatgcttctgtcttgttcctaattcgagggggccaataggaagaaagggagtggaagggggaggggtccatagcactcccctctcctggttggtattagagtgaacaagaagtgaattaggaaacaggccgggtgcggttgctcacccctgtaatcccagcactttgggaggccaagaggggtggatcacttgaggttaggagtttgagaccagcctaaccaacatggtgaaaccccgactctactaaaaatacaaaaattagccaggcatggtggcgggtgcctgtaatcccagttactctggaggctgaggcaagagaatcactggaacctgggagatggaggtttcagtgagccgagatggcgccgctgcacgccagcctgggtgacagagcgaaactctgtctcaaaaaaaaaaaaaaaaaagtgaaaaagtgaattaggagacatttgaagacccctgggcagagcagaaaaaaaggtggttagcatattttctcattcaactgaaatacatctgttgacctctaaagttcaaacaattgcagggctaactgcatccaaccatagctggagatgaattaaaattgatattctatagtcgtctatcaaataaaaataataaaagctaataaaaaataataatagcaaagacttacatagagcttacccgctgccaggcactaatccaagtactttggatatattaactcatttaatcttcccgtcaaccccttgaggtaggtgccatatacaaatgaatataaacttggttatgtttaaagaacaaaaagcttcataagctttttggtaaaataagctttggtggtaaaataggatagaggtaggtgatagttttgaaaaggaatctgagtccacatatcctataacataggatgttgccgtatatattgctggggcaaatatttatatgaagaaaacatacaaggatagcttatcggcatttttttaaatagccttgttcataaatttccactgaagagaatactaatctttgtagagagaaaagtaagatctaaaagagattagagaaaacaagaggatacgtgataaaaagtgaaaagacctcatagcggctaaaaatttatcaccaactggaggaaaattgcactcaaagagcctaaaatctaaaacaaaacaaaacactgggctggtcccttcttggaaatgataatctttattacagcttttccttcctgggattcttcctaatgctaattcctagtagctaaaataataataagggaatggaagatgaggcgaaaggagacgtttctgtattccattatattccagtaaagggagggcagtggggagggaatgcctcagagatctagaaagaaagaggaaagagaaacagcaaaaaaaggtttctgtatctgtttcttttaccttctcacccatttggaacaaaagggaggtggtcggggtaagatcaggttatattccaaagccaccagccattggatggcctggaaatgggaaagccaagctgatcccattctttcctccacagctaacagagaggcagggaaagcgaccagccttaccaggctgcaattcttgaccctgtgccttctcccacaccatcctgaagaagccactgacttccatccaccagaactgcttctctgctcttgcactgaaacctcctgccattttaaggacacggccctgtaggtcaccttaatctagtaactcacagtcatttatttggctctactatcaaagagaatttttcatcggtaagaaatggcactgttgggcagcgttgtcaatttgtactgctgagtaaagagatttcaaacgtctaggattaatatttgtgatatttaccctaggctagtcccagagttagattttaggctgggcgcagtggctcacgcctgtaatcccagcactttgggaggccaaggtgggcagaccacctgaggtcaggaatttgagaccagcctggcctacgtggtgaaaccccgtctctacgaaaaatacaaaaaaattagctgggcgtggtggcgcatgcctgtgatcccagctactcgggaagctgaggcaggagaatcgcttgtagccaggaggcggaggttgcagtgggcccagatcgcgccactgcactccagcctgggcaagaagagcgaaactcagtctcaattaaaaaaaaaaagaatctttaaaagtgtttttgcatggtgtttacaggtttctgaccttttagaatcctatcacatggtaaggaccaagcattttctgaccaaacactttttcaaataaggtaggtttatcaggaacacggtttacagcctatcattcccttttgacattggtccctgaaggaactacgaagtggaactgtgagctggtaagagatgaaaaagcaaatgacaggtcttactcttttttttctctcacaagttaaaagcctgcctttatattgattttcagatgctgaatatacatagttcatcttccagataatctcaatgtgtcttactccaataaacaaataaaatttatgagaatggaaaaaaagagatgaatttttatctgtaaacaacctttatacacgcgcacacacaaacattaacctgatctgcaactgactccttgcgataaaagacacttctgtcaggcactgacctggcagcctttacagggatgtggatccatgtgtattatttcgccaccacgaaaactctttaccaattaatctgacagaaaagggaccgcaaaattgttcataaattataatttgcatatttggcttaatcttaaaacctttgcatatctaaaagggtcatctttcccaaattccaataccttttaaactgtgatttaatgttacagttaatttccgtgactttgagttcttaatataatagcatgatagatacccaacatatagtatgtatctgcactactgtacacatgctcaaatctgacaacacctaatgctgagacaaaacatcagcctgtgcctattgttacaagtcatgtgcattttggtccctagaattttggtttactaaatgggaattgccaggaaggcagagagtggtcaaatttacgaaccaacaagccccaggctcccacaggccttgtgctgcacaggaagtgtctctgttttttgttttttaattttctataggacaagctttcccgctgccctcccattcacagatgttcccgatcctgacccactttccctagtctgtactacagtccagtggagaatgcactctctcagcctttgtctgtgggcaatcttattcttagcaagagatcttttcctataattttttttgtcctccattaaccatgctgaccaatgtttaagaatcattacattagttggttcttccattcaactgtaacatgctataataatattttaaacatcacttcactaaattctccctaagtcaaggaaactattctgagcaatccaggcacaagatttaattgcattgatttaattcaacaaatacataaagagtacctgctgtgcaccaggaactattctaggagtcaaagatacagaagtgaataaagagacaaaaatccctgtccttaaggagctgacatctgagatgcttgcctagattcataagaatctgggaaggtacttagattcacaggaattttatcagttcaagctaaactcatttgggatagaatgtatcttctcataatatcattaattagacattctaggactgggcttaccactggtttagcaaatggctggatggtatagaaaattaagcaactttggttatccagagaaattgttttcaacttagactgtgtggaaataggcattgcttttattgggtgcttccacatccaaaaaattttgttttccattgcaaagaggtaattttacccttacatgtatgagagtaccatcaaatctacaacataaagtgaaggaacaaagaaaaacgtcattcttgattctctactatgcttcacttaaaaaaattaatgtgtaccacaaatatgagggcactggttagttctagactttattgaaatgggctcatttcacttgatcctaacctgcatatctggcattcagcagaaggaacaaatttaaatcagatgttttgactggggtgactggaaatttgtaccactgttaagcacacctatacacacacacatatttatgtttgtgccgtatggtgttttttaaatgtcagcgttcattgaaagtgaatatgtaactatatgtatatttgttggtatagtcatatttgctttttaattccttcttttcatcggggtagatcagtttaaacaatttaaaaattagaaccaagaagttttatttaaagaaatactatttaagtgcattgctaactagaaataagtcaataagtgttgcccagtaatacgtttttaagatgtctacttgaacttattttgttgagtatgttcatatacttacaacagtttcataaggtctgctcatgttaggaaaaatcctttaagatcagtgaaaacaaaaaaaatgccaaaatattttgaaacggggtgcatttgataaaaatatcaagctatttctaacttgaattaagggaaatgaatgacataatgatcccattaaacaatatacatgaggccagccgcagtggctcaagcctgtaatcccagcaccttgggaggccgaggcaggcagatcacttgaggtcaggagttcaagaccagcctggccaacatggtgaaaccccgtctctattcaaaaagtagctgggcatggtggcaagtgcctgtaatcctggttaacttgggaggctgaggcaggagaattgcttgaacccaggaggcggaggtagcagtgatccaagattgcactgcttgcactctagcctgggcgacagggctagactctgtctcgaaaaaaaaaaaaaagtgtgtgtgtatatatatatatatacacatatgtcatatatatttatatatatgacatatatgtcatatatatttatacatatctgacaaatatatattttgttatatatataaagtgtgcatatatatatatatatatatgacaaacagacccaaaaaactttactttgatgactttaccaaacagagaaaagacattgattggttttactcaaggttttcttgttttgtttttttttttttgagacggagtctccctctgtcgcccaggccggactgcggactgcagtggcgcaatctcggctcactgcaagctccgcttcccgggttcacgccattctcctgcctcagcctcccgagtagctgggactacaggcgcccgccaccgcgcccggctaattttttgtatttttagtagagacggggtttcaccttgttagccaggatggtctcgatctcctgacctcatgatccacccgcctcggcctcccaaagtgctgggattacaggcgtgagccaccgcgcccggccgttttcttgtttttatgggaggttgaggagtggttcaggtgaactaatggccttaatgatttttactattgcttcaggtttggctaaatacatctaacctctctgcctgtttgtgcactgcagtttctgtatatgcagaggacaggtgtttttagtatactaagcacttttctaaaatgcaattaatgattcattctcatatttaatccactttaaacattccaccactgaaaaaaggtgaaaagggaggaaaaacttttttatggagaattacaatggaaatttcttcctgcctaaattattaaaagttccaaattagtaagtctaagttcatttttatcatacattacagaagtgatctaaatctcaaaaaaaaaaaaagtctacagatgttttaggcaattacctattatgtaatgcctcttcaatcagccatattttattgcaaggaaggggtcttaaaatagaaagttttgaaaaacagggaattcttataagtttggcaacccaaaaaattttattttggagctattcaatgagaaaaagaagataaaagaattaatgttgtatagagtgaaaaacaagttttgcttgtgaaatttaagctttggtttggtttctacgaggtagaaaataacctgttatattttatgtgtcagaggacataaattatgagtgttataggctgtaggtgacagacatacctggaaggtcaacgagactcaagatctctgttgtctcagcatgctccctcttcccagcctcctgtatgcaatcagtcgtccagttcatcagttctttcttcctcttgcctacagttctcagtttcctcccattcactttactcctgtccaaggccagcacttaggacttcacacttgtatttctaaagtgaccaccacatcagcttcctgtcttcattgtctcatgaacttcaccaccaaataaaatgttcctaagttccatcttgggcatttgtttaacagcctttctatagaccgctttgcttaataatttaaaatctgtacctttttacccagccagtcaagtttccccaggatctggccctaaccacctcttgaggtctaggttctattcctctccttcatcctgagtctaattatgcagatatccaatgagacaactgccctggcaccatcccatagggggcactgaaacaccactaatcaattagaaatacagcgccggttaactcaggtttctaccctcaaactccttactcattggtaaaatgtaaacaagagccattcccataaaagcacacaatataccctgagcaaagagatcaagtgccggtatccacggaaatgacctctatccgtggtgcgtatgactaatcatatccaattatgagtgctttttaaaaaatgaaagacaagtccaaataggttaaaatgtcatgttgcattcccagcatataacagacatcttattttgaaaataaagaaagaactatttgggtatacctattttattaatagaaaaccattctttcctttactcttccactagaaaatgtcaaatatttaaggagtcaaatgattagctcatcaggggcacgcacgcatctcagtccgccttcacccttgccatcttgtctccctacagtccatgaacacagcctgcattcttccccttgcctatgcatatgccgtttcttcctctggaatatcttccttacttttccctcagccacctgcaatcctaactgttctttaagatgcaagtgattttctacatttttccataacatcctcctcactctcactagccattaagtagtctctgttaccgcaaatcctatgttatctctgacatgataccacactgtcttttgtgcccgtttttctttttcaagaaaaaatatacacctacctcatgccaaacttttttctaagagtcttaaatgcatttttccatgtattcttcaaaataacctttgacactattatttccattttctagatgaataaactgagctttatggaaattagattacttgctcaaagtcatacaaccaagaaaaagcctgattccaatccaagtgtgtccatttctggagcatgagctctgaccataatgccatagggcttcagtcttacttccccatccccagtgtaaattccttcattacttgaggacaagcactgtgttttgggtacctaggtgcctctccacagtccccaatagagaacctttctggaccataacagatactcagcaaaggtatataaatgatggtgctgagattctttggaccttctgataggaatgcggtgtggatcccattacactttcagctgttctgaaagcacttgagaatgggatgaggcttctttcagtggtatgggcaaagccaatcgctgcaggagcaacattacagatgctccacaatgtggaaccatctttctgtgatctcctaaattggccttatatatttcacaacttttacatcttttctagtcaacttctttctaaattcttctaaagggctcatcatctaacactattctgacttcccaacactgtagtaaagcagtaaagcaatgccatatgctcatttgttaagcagcttgacataaatatccaaccaaccagagagtagagaaattaaaatgacaaagcacgataaatgatcaaaaaatatagatgtccaaaagccgaatgtagacacaatttaaaattagaagactcatcaaagtgggaggggctggaaagattagttacatgtttattattgcaaaaactaggaacagcctaaatgtccaaaagaaagggactgcttaactaaacaatggtgtgtccaaacaacggaataccacacagtcatcagaaattagtcattcgacaaatattcattgagtgcctcatgtacatgaggtaaatgaaaaagaaatgatacctgccttcatggtgcttagagtctaaatgatgatacagaagtatatataatgacaaaaacaattttatattgctgggtgacgtggtaggttacaatagagtaaatctgtgtgaattagtttttttgttgttgctgttgctcataacttgaagatatatttgttctgtgttcacaccttgccttgaagatgtttaagttcagcattaacgtcataggaagtggtaaacttcaatcactcccttccttagggacactaggatattgaaaagactaaaatactgaaagacctaattatatgtgtataggaagaatggaaaagctggcattatttcataaaagtagacatccaagtgagttggtctggcaatattaaattttacagaagaaagtaaagttgcacattcaaattaaaactgaaaagtatttcaaaattcaaaaattcaaaaaatttaaaaagtaattaaaaatttaaagtgaaaatgaggcaagtacaaatcaaataaagattagtttgaattccaattgaaactaattttcagatagctctttgaaatatatattccctgtaagcatacattattttaaagtatgaattaaaagtcttccactgaccaattacaacacagaagtattgtctactgatgcactttttaaaagaaaaaagtcagaaaaagaaaagcaaagtcaagtacgcaaagaaaaaagagaatgaaatttaaaatcatgaaacatcaataaaaaggatgtctatcactctgggttaccctgttttgcataagtcctgaagacataactaactagcaagaacagaagctctataatttcttaaggtaaaaaataataaactataagatttataatattcgaacttctttactcttcaaattcttaatttttagaaatggagagaaacttcctcaaattgatgaagagcatctaaaaaaagtctatcattaaaatagttattgttgaaagactgaatgctttctccctgataccacgaacaaagcaaggatgtctgttctcactcctgttattcaacaaagtgttggaagtgctagccagggcaataaggcaggaaaataaaattaaaagtatacagatgggccaggtgtggtggcttacgcctgtaatcccagcactttgagaggccgaggtgagtggatcactcggggttaggagttcgagaccagcctagccaacatggtgaaatcctgtctctactaaaatacaaaaattagccacatgtggtggcacacgcttgtaatcccaggtactcaggaggctgaggcatgagaatcgctttaacccaagaggcggcagttgtagtcagcccagattgtgccactgcactccagcctgggcaacagagcaagacgccatctcaaaaaaatacataaaaataaaggtatacagatgaaaaaggattggttcctgtttatgaatgacatgattgtgtaaatggaaaatctcaagagatctttaaaaaaaaaggacctcctaaaactagtgagtccagcaagataacaggatacaagattagcatacaaaatataatttatatttctatgtcctagcaataaatatgtgagcaccaaagttgagaatagagtaccatttacacttactgaaagatgaaatatttaggtataactctaacaaaacaaatacaggacttatgtgctgaaaactaaaaaattctgatgaaaaaaaccaaagaagatctaaataaatggagaggcatactgcattaatggattggaagacaacatagtaagatgtgacttttccttaacttgatacacaagtttaaaacagttcttaccaaaatcccagcaatagatttgtagatgaagacaaatattctaaaatgtatgtgaaaatgcaaagagactgatataatggaagcaattttgaaaaaaagaataaagtagaaggcatcagtgtacctgatttcaagacttactactgtatatagttatggtaatcaagactgtggggtactagtgaagagacaaacactagatcaatgaaacagaatagagaacccagagatagatccacctaatacaaatatgttcaatttatttttgacagttgcaaaagcaatttcacggaggaaggacagacttttcaacaaatggccagagcaactaaacattcattggcaaaacaaacataaaacaaaaccaaaccaaaaatacccacctttacctaaacctcacaccttatacagaaagtatctcaaaacggatcacaaacttaaatgtaaaatgtaaaactataaagattttaggaaaaaaagtaagagaaaatctttgggagctagagctaggaaagaattcttaaagtcaacaccaaaagcataacgagtcaaggaaaatttggtaagttttgttctgtgaaaaatcttttgttctgtgacagattctcttaagagaacgaaagaacaatcacatgttgggagaaaatatttgcaaaccatatatctaacaaggatttctatctagactatataaagaattctcaaaacacagcagtaagaaaacattccaattagaatatgggcaaaagacttgaacagacatttcactgaagatgacatacagatggcacataagcacacaaaaagatgttcaacatcattagccaccagggaaatgcaaattaaggccgcaatgagacatcactatacacttagcagaatggctaaaataaaaaacagtgacaccaccaaatactggcaaagatttagagaaatggaccatttgtacattgctggtagacaagtaaaataatacagcccctgttgaaaataggcagtttctttaaaaactaaacatgcaactaccatatgaccaagcagttgtactcctggatatttatcccagaaaaataaaaattatatccacagaaaaccctgtatatgattgctcatatcagttttattcataaataaccaaaacctataaaaaacaaattatctttcaagggatgaatgcttaaacaaagtattgcatatccatactatggcatactactcagcaataaaaaggaatgaactattgatacacacaacagagaatcatgctgagcaggcgaaaaaaagaaaaaacctatcccaaaagtttacagtatgtgattctgtttatataacattcttgaaatgacaaaattataaaaatgagtatctagtggttaagaaagggggatagaggaaaaataggtgtagctataacagggcaatatgagagattctagtggttagggaaatgttctgtatcttgattgtatcaatgttaataccctggttgatagactgtattatagttttttaaaatattaccatttgggggaattgggctaagaatacatgagatgtgtctgtatcatgccttacaactgcatgtgaatctagttatctcaaaataaaaaggttaattttaaaaatacaaaaaggaatgaatacgctagattattagtgctagttagggtggggttaattttctattaagtctaattgggtttctacagacaactgctggtgtagctatctccaattcaaataacctaaaattttaatttgagaactactcagattctaatttaaacctctgggtgctccccttttctatgtggcagcttctgctggtatatgtaaccgcacaaaagccaaacaaatgtataacgcataataaaaaaaccaaaaccctttacacaatgtcaaagtggaaaatgaatgtgcaaatattagaaacaaatacacatgtatctactcatggaaagatcaaacaaaagcataaactataatatttttgtagcagtgaaagagcaaatgttttaaagaagaaaacaatcttgtttatcttaatatattaataatgtcactacatggaaggaataggaaaaagcaaaggacaggtatttggccccgagttacaaactccaagcaaataataatcaaaatattctgtcaacttttctgcatttctttgtggaaggtaaagtctaatagttgcttgcagccatgcttactttttttccattcattcattaattcatccacaagaatttttggaagtctattatcaggtactttgcagttagagaggcaagaagataaaatagaaatggtttctgctaatcatgtttttatgattttatgttttaaataaatgggcttagtttaatgttttgtatataatgttttgggacatagtgtttttaacttattataacttatgtaactaatcccttaatgttggggcacatatatgttttctcaacttttcataattataattaacacagagcagtcataactgacaataaactagaaataaaaaagacaagaaaaatgaaaaaatacttaaaaataaatgaagtcttacaaaacctctcaattcaaattgctaatatgtgcaaaattagtaactgaagaataattttttttctcttttccaaattgttgtttaaacctcaacctcttgacaaacttgggttctaattgtttttctgttcactaatcttttaggttaactctgccctccgcccacactgaactactttcagttcccctaactgaccatattctttttccagggatttggatatgttttttcagtttagaaaactctccctacacaacactgacaaaatcctaataaatctttgggcttcaaagacactttttatgtaaaacctttgcaggtccctcagaagcctgagtgaagtataccttagtcaccctgtaattaattacttcaccatattacaatgatctgtttacttgtctgtcttccccactagacccaaagctctttgacaatgttttgttcactatttatccccagcgctgagaaaacagcctgacccatagcagatgctactctataaatacctaatgagtgaggaatgaatgcatgaacaaatagactcttaagcctctggcctaggaagatgggcagctcctcattcacccagatgactggatcttgcttatgaacacggccaacaacataaggcagctctctgaaatatatgttagagcctcaatctttccactgctatacaatctaggaacttaggcacctttccagaaaacaacacctcatctaagaggtgtctcctgagagctactcttggaagcaccgaagtccttttcacaaagactgcaaggtccttgaaaagatacactgtgtaacttcagtgtacaatgagcagctgggagtgttttgggcgaagttggtataaaagggtgcctttaatacaatatttaggtaggttgacctgactgcctaatttatatgacgaaatattaaagccctgggtactgtgaggatttcctagtactaaagtttgtccttatgtttccatctttctcagtattgagattacaaatcttggaacaccagttctgagggagcttggtagtcttcccttcaacaaaggctttaagacacaggacatatgccttgttttctcaagtctcatttcagaagattcttcccactgcaaacaccaatgctattttttttccctcctgacctttgtcaactgtgttgctgtactgcatttggaagtattacaatggtcattacctgccctgtttattcagtgttaagtattaacaaggcctgtgctatctcagctgctgtcatatttctccagaaaagaaatgcctatgtaaatgtcctaatgcaaacaaaagactctttttctaggtgggggtggcagaagacttggagacaattgaaaagatggaagaaaacagtagatattttaaaagaacagttttcagaaatatatgaaataattgcaccatgaaatctaatttgaggctgatttttttttttgtttgtgcatttggtcagttctggcctggtatttgctcatattgaggctataaagcacatatttctggatttatttataatgacttcaaatagtttgatattgagcaaaagtgtataaatatattacagaataaagagaaaaagtaacccttggcatcaaactctctttgtttagggtttacatgtttggtttcttgtgtggaacagctatgtcagagtgggtgggatcctgtttctgagggaatggaagagtgctgacaatattttcttgagcacaaagaagggtgaagagtcttattaaaactcctaccagatactgcttgttggacagtgaaattgcaaaacttgcaaagaggagggccaaacaccatgcagaacagatcaaatacaaattaaaaaattgacttggggaagaaaaatctttcactagagtcagcttttctgtagaaattggcccgttctcataaatttacctaagtttgtgcttgggtcagatgacaaagcaaaattccatcctctgatagttgcaaaaaactgccagtgaaacaaactgaagccaaatacatacttcctagatgacatccgatccagagaaacaaaggtgtaggtcactttttcatttttaaagtacccaaggagttacagagagatgaaaatagacaatacgtggagaaaagaagactgcttctcttctgtagctatagccatatgaaataaaacaactgtacctgctgggacttacaaatatgtgtgttatttaggagaacgggctctggagttacacttgcaagctctgaatcccagtttaaccattccattactgtgtgagcttagataagttacttaactatttttaattttctaccttttagaagtgagtatggactacttaagcaatagaaattaactagggctggaaaaaaagaatgatttgctggaagtacttcagcagcataacctttatgtaagaacaaatatcatcatttattgagggcctacctaatgtgtgccaggcattttggatacactattctaatctttatacatccctgcaaggttaatactattattcccaatttataaggttcaaagtagctaagtaattagatctacgtcttgaagctgaaaagtggcaaaaatatctacccatattccttacctaattttttttccttatttttaaaacaatgacccaagaatttctcttccctctctgattcctttttctccaatcctactcaggtcataactgcattgggaatctcatttctttcttctttctcttctttatccagtttaacgttcctgaatccactcaccaacctcccttcttcctccgcttcctggtgccactgatcccaatccttcctccagttttgtttggcttaagtcctgtcctgaatcccactgccccatcaggtccaccccactccatcagcactgtcatcataatgagagcaaatacctattagcacttttctacgtgtcaggtgccttatgagatggataccattattatccccattttagagatatgggaactgggacaccaaaaggtaacatagcctaccaggacacagaagtagcagagatggagtgctaacctcaacagtctggctccagagttcttggtccagccctactctagacggtgccacagccctggagggacccaagggaagttgcaaattccagcaagtgagtgtgagcatgagagaggaggacctgtttcaaataggggtaaatacattctatgatgtgtgaaaccaaattgcttcccttttgttgtaaataacatgtaaatgtatacttttaaaatcactatgggtaaaatgtttttttagtgggttagcctaggaacactgtttttatgggaacataaattctgagttacccccaaaaaactattggaacagcctgttcataaattgaagacttcctttatttctgtttggggtaaagttaaagtaagggaaatcggaaaaaggaggaaagtaagacttctcattatttgtagatacaattcctgcacagtagaatgcaatctggataatacgtcccaactttctaagtgtgctaaaaataaatgtaaatggttcattagagctaatctggcagccaaaagtgaatattaataacatggaagatcaataagatgcccagcaaagaacaatgtattaacttggttctagaaatagcaaaatgtgtgtaggccagacaagaagcaatgggacaggaggcacagtcagaagaaaaattcatctcttctttataagattcaaggaattgagaatagacaaaatatgcccatctctttttccctctgcccactaaataagcagtttaatcaatttttacctttccttccttgtcttcatctgtcactactaactcaatagaagaatgtataaccctagttcaaatacaggtcaagatggctattataaatattatgagcttatgctgtgactttctctctcagttcttatgttgtatactctattcaagtaagggacagcacagagtagcttttacccaaagcatattcagtgaagaaaggggttccatggtcaaataaatctgagaaatgctgcataataatcccccttttaagatattgaaggctctgagacatcttgcaggaaagacacctgtataatatatggaacccaggttttcccaagccttttgaccatataatcctttttacctaacccctattcacatctttgtgcagaatgatactgagaactctgaaccaggaagagagcaaatcaagttcctatcttattttcctgtgtgatttagagaagttgcccagcttccctggacttcaatttcctgagagatggaccacataatagctagacgttctgtccagtcatgcagctctaagggtattttcaacccatgtgcttccatggccatcatcaatgcgcatggaagctgaggtctgtggatacactcttggtgagtgagcatgtgccctcctgctaagcccacctcagaagcgacttccatcacccaggagcagcctagacaatggatcttttacacatcttcacattcagtcctttatgcccaagcgaagtactcacattgcaaaggctatttgtcagggggatatgtggagggaggaaatttgcagagaattgttaaaacaagcttatatttgttctttcaaatatttgctggcattcagacatggcttttaaaaaagtttcttgtgctttttcatttaaatatgcaagtttaataaacataattcacccaaaacagagaaatgaagcaaattcttacaactgattctttaggtctacactcttaggccacattctaagatgttttcacttgaaatgctgttaattctgacattttaactttttcttttggaaaaattatcataagccaaaggattgtccctaatattgaaaatatattactgtcacacagtttcacaaaattattcaccttttacttttatttacatattactctcctttaaaacagtgtggaaagtactacctctctacaagttgaaactgactttttactttcttgtttttatagcaagagcatattaatgatataacagcaatagctaacactcatctacatgcctagtatgtgacaaacattattctaagtaatgtatatgtgtgtatcaatcttaacaaccttataaaatagatactattattatccaattttcaagatgtggaaactgaggcacagataggataagtaacttgccaaggtcacataccagtagtaagcagcagagtcaagatggatggattgattgatttttttttttttttttagagacagtgtcttgctccgtcgcccaggctggagtgcagtggtgctatcacagctcactgcagcctcaaactcctgggctcaaatgatctccctgtctcagcctctggagtagctgggactataggtgcacatcactgtgcctggctaatttttaaatttttaacagagatgggtgcctcactttgttgcccagactggtctcaaacacctggcttctggcaatcttcccaccttggctccccaaagtgctggattacaagcgtgtgctgggattacaggcgtgtgctgggattacaggcataagccactgagcccggcccagagtcaagatttgactccagcagtctttgctcttaatcactctgctattcaacctcttgcttaaatttgtaaaacaatagaaccaccaccaaaaaatatatataaatagctgaggaagaaatacaatttggagttacatgaagcccataatataactaaagaaaagggagtatctaacctcttggttccacttagatcaaaggagaaaggcctgacttacactatgaaaaacactggttagagacgtgaaaacatatcttctctgttcaatgccatgagattggctcacctgagtaggctgcagaatcttcttcccaaatgcttaataacaaaagtgagagaaccatccaaaatattctgaaaaaaatctcacagaagttaggatgggctaaattaaccatcctcaaccccattactctttcctaagagtactcgatggctatgtttccaaattattcaaaacatgttccctaatgtgttaatgggggagagtgaggaagcagagacagattaaaaagactcaagagatataacaaccaatgtaatgtgtggactttgtcgggatcctgattgacacaaacctacttggaaaaggctgttttgggacaattgagttaatttgattatgggttaggtattagatgatactaatattgttaggcttgataatagcatcattgttatatgagaactctccatttttctgagaaataacctaaagtaaataagggtgaaatgacacatctgagatttttactttgacaaaaaagagggagacgacagatgaactgagtatgacaaaatcttggtactcagtgtatctgagtaatggtatatgaagggtcattctctttgtttttgcatatatttgacaattttcatgatagagtatcttgataaagaatatggaaagatttctgtcctgatgaaaataattatgatagataaaattatttaaaaacctgctagagaaatgccagatacacacctgggtacacagttcacttcccctaggactgaggccaggaaaaagaataagaaataaagggaagagcatagggcaacctggaccagagacagacaggaagacaagagaaacacagccacggtgccaacattgtttcaggaagattttacaacaccagctgtcagctctagatatactgttgccactttcgacttcatctagaagtgtccttctacccaatgctctcaaccgcgattgaaaaatactacataaaatgagtctcggatctctgcccaccttatgtgttttggcgtttaaaaacctctcccatggattggctctcagtccttaggggtacgtggtttcattactgaggtatgcctgtgtgcaggaatgtgtgagtttgtgtgcatgggcagctcctccctgatcactgtggctatgtcataatgcacatccttgtcttttactcattgggttatacctaacagccaaatttgtttgttattccaggtgtgcttaacatacgtcaatcttcaagacaactaatatcccttaatgattaggaacctcgatttttttttccaagaaaataaccatataactaaatcattaaacttcccttaagtgccttattagaggctcatcaaaacatatatatgtgtgtgtgtgtgtctgtgtgcatatacacatatatacatctttaaatttttattttacttacttatatatatttttgagacggaatctcactctgtggcccaggctggagtgcagtggcgtgatcttggctcactgcaacctccacctcccaggttcaagcgattctcatgcttcagcctcccaagtagctgggattacaggcatgcgccactacacctagctaatttttgtattttagtacagacggggtttcaccacgttggccaggctggtttcaaactcctgacctcaagtactccacctgcctcagcctcccaaagtgctgggattacagccctgagccaccacatctggtcaaaacatatattaaaatgcaaataaaaacctttacgacagaaagaaacattgaacaaattagttggttggactcaacaaatactattttctagcctcctctttccccctacacaaagacagccactgatacattttgttgctaaaaatgcactagctttttgcttttgatcacactctatggtaaattttgcatcccagttttctcacctaacattaaaatatgggcattttttcctgttctaattccgcataaacacccattagtagctggagaatatcctgttaagtacagacagtaaagttttgtaaattttcccctactattgaacattagattgttgccatttatttaatattataaaataaataatgctttatatgtgcaatactttcttatataattatgtgtgtttccatagtactgatccttagatcataattaaaaactaaattaaaaacagtacctagtagtttaccttaacacaagaaagaaaaatagtagaaaaaggaaaaaaaaaaaagacaggttctgttgagcagtgagtttgcactggctgagcccaatgtcccgactctattatctgtgactcacatggcgtgcttgaagaaaaatatccccgtcttgttgcttcttggtagcccatggcattatcctttatctaaccctagttacttctctgggatgtttcttgctccagttgttttcctcatggtgtaacaatgtgaatttgcagtcctgactgttctctttagaatttcatcacttctttgcttccattgcagtttgcttgcacttctaatgcagcacttccttccccttctcccgtggtatactttagttgtttgcactctgtctgctgagatgctttaactcatcttttaatcacctacagtgcctgggatcgtgctctgcacagaacactgccaggccattagcagattttcatcaaattattaacatcattctgttcttgagcagggtagttcccttcaagttgccctctgccctacccagtgcttaaaaacacctctctcgttcgcgtctacaaatttaatgaatgtgttgtttatatcctttcccagataattaatgaagatgttaaataagaccatgctgaacactcgtccagattcaatacattgccatttatcattacactttcagtccttcaggcagttttcaatcaatttgacacattcaagtcaatttgaattcattttctgaactagatttcatgagacctgctatcaattcttccattaacatctggatgtatttagatataataatatatctagtgtattctttttgtccactgttttccaattttcaaaacaaaaaatcgattaagttggtataacatgaaaaagctttatagatttatgctgtttgtagctcttggctctaatacctcatagatgttcacatatttaccctctcaaatgttctagtatttgttagcaatgtagttttcctaattcacttatttatccaacaaatgtttatggaatacttattatgggcaagtattatgtttggaataggtttaacactaattctatttagaaattaattattcaggggctcttgttctgtgaagtgtacaggacaatgtctctcctaaactatttttcattttatttttactatacattagcaacactggagcatagatgaagcaggaagaagagagaaagcatgtgtggcttctaactggcagttctgataaagaggttcctggggtaaggattctgaaaaaaaagtggctaaaataagacaagagaatgaatctgagatatctctgccaatgatactctgaacaagtgagaactggatatgcagtctttactccagtgtctgtctgtctgtttctctctctctttcctccccatctctctccttctctctctctctttctcattattcttcgtgattccaaaggagagctaccatattttgaggaattcattattatttccattaacactggctaacacatcatctaagatcttgcctatttatttgttttcttctttttttaatgaaacgggtcttcattactgtttaattatccttatttatcttcttaaaggccagttttaaaaagcagttccaaagctcagccattttgccatcaatagctcagacatttgagcataatcattaagcttatctccctattcatttaatgctaggcctcctttatctctagtatgctttcctttctcttctttattatgtttgtattattaccctttgcaccactgatcgccataaatacttcttggttgtaactctggaacctctttgatgattcatgctctcctgtgagagtcctatagacagacttgatttactttcagctttctcctttttttccttctatttttgcactgttgtcattgtcacttttagactgcgtctggtttttacaatgatgtccagtcttcgaggtgaaaccgctgaccttgagtaaagcacctgccccaattctgcaaggtaacaagtgctgcagaaccacgggacccagctaaatggtcagagactgcccaggtacacctgctctcagcccagggggacaggtaccatcttctcagtcaatcagtaaaaccaaaccctgctcagcacagggtagcagcaacaccaattcaactagagaaaagggaaatgatccctattggtgagtttgccacctgaaaatagtacacttggtcacttccagcaatggttcctcccttgaacactgccactgcgattagaacaactgttttcccacttatcagttatgcctcaaagaccacaaactaggagaaatgctgaattctctctctttctgggtgatatccatgctcacatttggatttaagtacatcccctccttctttttgtattcctttcttatttgtgtggtaactgaatttgagactgttaactgttattgctggattaattaccaactaattttcaccttgtattgtagcacaaaaataaattttttaaaatagggaaaattttgagaaaatatttcattagggataaactacagaaaaagagggcttattactatattagtaagcataatactatttataaatattacatctatcatttcaattttatgtgtcttctaaaaagactgaaacaagtcacccataattattacataaatgccacttttaatatcagcttaggaaatatgtatatttttctttcaaaactaccataagcaaagatgctaacattttgttttttaaaattcgtacaaaataaatctatccaaagcttttggccacacacccatattttaaccaaagttactctggatagtttgaggaggattctgcttggtctgacaaaataagatgatgaagatgaaataagttgggttttttccctcctctgtctgagtgacagccactcacacatccacactattttcatttaggagtgcatttaacattctgtgagtaggaagaaacgaaaaggatgaggtaaggatattgtttttccccaatcacacatttctctttgcccatcctggtttctctgtgtcttatttcccttctaattattttccactccttcagttctggtgctgatgcggtccctggttcatttccctcctcccctcccattttcaggataactgtattcttcatctttaaatgtcccaccgatcacacgtcagtgacttcatggcagcttccttggagacaggagattagattattttaaaattacaaccacctattgataaactaccatataaggcactggacaacacacactagctttggcagggggcctgccctaaattgttcaacacttaccaggggaaagtcttacctgcccagagtgaagatcaatgccacaggaagacaaaattcagttttatttactggacagaggaaaataagggccaggctccaaacagctatctcaaagcatgccatcctcacctccatccacctcctcccaccttttcctttttgtcccatgtttttgtttttcttttctacctggttttgcttctgtatttcctgacaactcaagattcctttacctcatctcacttctttcccttcaactccctaggcatttcacctcctccctccctttttggctctccatcccagtctcccagcttgcggagatacaagcacacacttccaaatgctgccaactaagtgctccaggggtagggagttctgaggctacctcccgccactgggcaagcctcataacagaggagacattctaaaccccagggatggtaaaaatcatcatcattattacctctccaggcactgctgtgttaagcagagatgaggctcccacctttgataatgagaaactcagaaattacagaggttggtaacacagcatcagcatataataccgtctgaaaaacctgggctccagttatcttgtgataggcagcgacagcagagattaaaacccaccagaaaacagccgcagactgtactgatgctgtgctcctgcactaaatggccacagtcacacccctgtcctccgatattgccacgagttatgattactctccttagtcccactatattagaaaaaaatttaaaggggcatttaaagcaaattcaggcacaaatagattaacaacaaagaaaacgccatcattattcttccaatgcttactcattctatgatttaaatatttattcttcaaataacagctagtgtatgtccatatgaaatcatcagaacgttggaccttcggctctcctccgagggtcaaagctgagattttgtgtgtataatattattatagaaagaataaatatttaaaaatggactaagtaattttttcttatagactgctgcagagaacaaaaagtttcatatggcttccaactcagaggaagtttgtgactggatgtgaggagactacaaagttattagaggatagacaacaaaccctatgagcccgtcacatctccttcactgaaattttgctatattaaattttgattcaaataagtaatccatcagcaaaggttttgcaatattggttatacaaagatcttcaatgactgacatttgttgaagtgggatttaagttaaattttataataaccctgtagtggcatggaaacttttatccatacattttaaactttcatagggttagtcatcatgatattttgggaatgacaagattaccttcatcagaaacttccttctactatttctgcctgccaaggtgcatctgaaaaatttcttctttcacagagattttccttctcccccagctgagagtgatctctctgtactctgagatatgctcaaattctcctacgtttctatttccagccttgccttctccctcacccccaactcttactggaagcaactttttcagcaactggaactaacttgcagtctctgtctgccttggctgactggccaacggtcttaataaatagcaaccactaaataaatcaaaatttttccaaagaaaatatgaaacttggatcttaactctacttagccttaaatttacctgtctgtgcacatttcattttcccacccactaaacagtattcctatagctctggttgtatccatgtagatttagattgatggttctagaatcacagaattggaaatgatcgtagatataatttagttcaacccactcattttcaaagacaaggcaagggaagctaaaagaggttaagtgcccttttatcacagttagtgataaaattcaggcaaaattgaaagtggctgctccagcctatctttgtagcggatgacctgtcttagaatttgttgaacctctagcattgaatgtagactgattttaacctgaatgaaaacttcagacttgaaattattctgcttttaaggaaagtgaaattgttaattggttttagtaaaccagatatttaaaatcattttacttccattcagttcctcatcaagtctaagcaattgggtactgtactttgactattaaacctgtaagttatctgaaaataatttttattacacattatataatactgaaagtattagactcacatccatatcaatgatacaaatgggtaaattagtacaaactttctgaagggcatttggcagtatgttaccaaaaacttaatatttgaaccctcttcattctgtcaacgtcatttctaaagatttattctgaggaaaacttactcgacatctaggaatatggtcaatttttattcttctgcctttacactttttgataaattccaaagttccttacaatgaatttatgtcatttctaccattggaaaaaaacctctcattgtttgtaaaaaaaaaaaaaaaaaaaagtgagagaatgcaactggctgcttatccttcaagaaaatatcgggctcttgtgcactgggtgatttttttctttctggtcaaaagtttgtagaaagggagaaactgtgtttcctgggaaaagccaccagcttctaaccatgaacgggtgttcagagcatgagtctgttttggaatttccaaaaagcatacaagaataaggctctggctgaacatccttttcctatatggattgcacataatcaatagacctagaagcacttattgaacacatcctgtgaacatcattgcactaagagctattcgaaacaaatggcaagggcttttccatgccatttataactaagccctgtggcaatgacataaacatatgaaaagatgaccatgaatagaggccgtaattaatttccaaatacaaaatgtaggtatctagaaaaggaagaagctcacgcaaaacctgagtggcgaggaaaggctttgcagagaagggctcagccttgaaaaaaagatggagcaagaagaggtacggtatgggaaagaatggttttactgggtttgagtggtagaatactgaaaaacaaagatcagaaggaaaggctgggcaggcccagcctgaggagcatctcaactcccgaatgacatttgatcgcctcactggatgtctattttatgttagatgctccataaggccatatagcacagtggttaagagcactgagttctagaatcagagcacctggattcaaaccaactctgatgcttactagctctgtgatcttggataagtcacctaagctctcagtttccacatatataaaatgaggataacaacagtactcaccacacagggttatcgggatgattaagtatgcatgtgtaaggactgaataaatgttcaaatgttggcatggcactgggcacacaatggaataatgtctgcttgcattaagcagtgctatgagacttttttaaagtgtgcattcttattttaaaatctttgtgaggtctataaaagaatgtgcccacctttggaactacaatggcctgaacataaatgagttgttttttgacgactaaccaccctgcaatgggtctcagagtcatcattatataccacccttctcacagtgtggaccaataataataacaacaacaacagcaacaacagctttgtatagcaaccaagggtttacaaaaggcttctatctcattcacaagaattccatgaggtaagccagacaagaatcaggatggaggcaagacgaggacccagggtttctgcgttcttgtctaggactctttatagcttacaaagtagcctatgaagagacagaccaaatacaaactgatccttagactcaacctggaagttaattccttataaatgaacatctgatgtgagatagtctggttgtgatttgacttagacagaaatggagtagattacttagaaatttaaactcttaataaaccattgaagttttgatgtccaatgttcacacataccttgaaaaagagatggagttggaagacatatggtatgagaaagaaagattttactgggtttgagtggcagaatactgaagaacaaggatcagaaggaaaggctgggtgggcccaacctgaggagcacctcaactcccaaatgatgtctgatcacctcactgaatgtctattttgtgctagatgctccataacgccatatagcacagtggttaagagcactgagatctggaatcagagtacctggattcaaaccaagtctgatgcttactagctctgtgaagatacctctgattttcagtattcaactattcagtagctgaatttttgtcttgctttagatttgaaaggaaagtaacaaagagggcattgctattatttgattgtagtttgaatccctgcttgtctaattccaggaagttccagttaataatatacaaccaaatcaaataacatattgatggaggttatacatgggtagaggcaggcaaagcaacatctacaaaccccactgggaaacagttaccagacacaagctaaaaatgtattcagttgtccaacaatatgaaccaaggaagttcttttttgagatggagtcttgctctattgcccaggctggagtgcagtagcatgatctcggctcactgcaacctctgcctcccaggtacaagcaattctcctgtctcaccctcctgagtagctgggattacaggtgcctgccacaccatgcctggctaattttttcgtatttttagttgagacagggtttcaccatgttggcaaggctggtttcgaactcctgacctcaagtgacacacctgcctcagtctccaaaagtgctgggattagaagtatgagccaccacgcccggccaagccaaggaaattctaaggtgaaaccctgaaaaacagaaagttcatgttccaaatatgtgaaatcaacggagtcctttccaaatcagatatctgaacacaggacccaggttttcctccttgttttatccaatagtataattactgcaatcatcacttaataacatatagcttttaaattacaaaccacatccttacctctagggaatatatgtaaaaatctttccattaaaatgctaacattgctgggcacagtggctcacgcctgtaatcccagcactttgggaggccaagcaggtagatcacgaggtcaggagatcaagaccatcctggctaacacagtgaaaacccgtctactaaaaatacaaaaatttagccgggcgtggtggcacgccagctacccaggaggctgagacaggagaatcgcttgaacccgggaggtggaggttgcagtgagccgagactgcaccactgcactccagcctgggcaacagagcgagactccgtctcaaaaaaaaaaaaaaacccaaaaacaaaaaactaacattaataaagtttagcaccaaattgctctacctgaggttgaacggtaatgctttagtttaattcccttcggaacacattatctactttttgggtagagttctatcctgatgtatttcttactggggagttcaaagaacaaagagcatagttgagaatgaattgagatgaactcaaaccagaaacaaagcatatccacgaaagggaatagattatacaggaaagtaaggattaggaccgattccttttctaaatgactggccactgttacagccttattctgttgtcaacagtacttctgctgttaactgagcttacacacagtgtcagtcaaggttttcattgaataacaagtgtgtgtgatttctaatacatgtgaggcccattctgacgcagtatgtattaaaatgagccaagggaacatctaccaatggcccctgtcgttgcctgcctcactgctttcctggatacatttgcctcaagtggacacagcagctggagagagggatgtaaagcaagacctccgtcacccagcatgcaggaacatgagtatttactggctccatcttcactgtcagagaatactacagggaggatgaaacagctaccgcgattaaaaacctgctcccttgaaaacagccatgccactgctgtgccacacaatgaccctttcaagtcgggtgctgagctagatcagcacctctcctgcaacttctttgatggctcagtgtagactgtacggtgtgccagagagtccaagcacagctccagcaggaatctcctggagcagaaggctcaggagaagatgagaagaacagctgcctattttctacctcaaccacggccaattttgtgctccagccctccttttcccattccaagtggcatatcctttcttcctctgtccctctatttaacagtcagacaagaataatttactggaaaattgttaagttataaaaataaccatgctttctttcacttcttttcccaaaagtttgtctcctagagccaatctttagaatccaactcttggtgtgtattttagaaaacaccttgaagatgacggtggctcagaagcacactatggtacatgctgctgctatggtcagtgctctgtgctcttcagtcccactttccaatactgaaacttgcttcaacacaagaatttatatcagactgatattgtcacaagttccaaggatcccagctgacatcgctgtggccctgcttgggggaaatagaactaaaagactttatattaattcactggtatcttttagtccactgacgatcatataacacagttcagtagattactgggaaagtgaggcactaagaaccctgatgtttttgttcccagaaaacctgaagctcaagactgtgtatagggaagcactataaatgacttctgaccctctgcttgaaaaaaaaaaaacaaaaacaaaacagcaacaaaacaaaaaacaaactaagaacggatcaagaagttcctcaggttaggttttaacacgaatccttagcacattattatctttctgctctaaaactggagtttgcactttaaatagagatttcaataaattaatgcattagctacaaagaaatggactcaatttaaatgactaagcaagtgacctgaatattatttcctttaaatagcctgagcaacatgaaaagaaaatacaaaaaggaatctgagtaatgccctatgtctacaagattccatctaagtagagcatgtctcccacaatgtgactcacaggaggcctgcagcttcagttttgaacaaacaaacgcacgtcttcattcagcacaaagctaactagtgttagttatacagctaactagttatgcaggctatccatatttacataatcagaaacacattgctttcaataagacaaggcccactgagttacatatgaccctaaggtacgtgtatttcaacgcatgttaaactgtacttttcagaaaatcattttgtttaacaaactctcagcaggcaccctgattagacataatctataagggccctttgtctcgagctacactgctctgctgtatggggctctctttgtggtgataattggtttggctgtccattccacccatcaggtgatagaaaactatcaatcagcctaaatgcaatgtgagagaagtctcgttagccaattagtcagtaatgagaacattagctaagatatcttctgcagagggcaccttagccattccactagtctgagaagatgacagtccctatgtgattaataaagatcacaggatacttcagaaattctacatgggtgaagaagagagtcagaaagaaatgcactcggaaatgctgactgtttctagtgctgccaagtgctttacgcaaaaacattccaaaaccacagaaccacagaacttcagagctggaaaggaccctgaagatgatttgatctcacacctgcattttacagatacggcagggagtgaaatgaattgtccaaggtcacccagctggctggcaatggtgcacctcttgtggctccaaagaaaaatatttggactgataaaagcaaacaaaacaggcagcacatcagtatggagagatcctacatggcttctgatatttttatgggtgtgtcttttttctctactggtggcaaggattatatgttttccttccctgacttcctagggccaaacatgatcactgtttgtcctgaggaagtatcacacatatttagagcaatggctcctaggccagattgcctgggtccataatgccagctctgctacttactacacgtgtgactttggacaagtactgaatgccctgtacctcagcttccccatctgtaaaagaggataatagtccctacctcccagggttatgacaataattaagagttagtctacataaaacacagggaacagaggctagcacttgcaagctcggctattattattcatgaaggtgcttgtgaaatgacagctgcaacgacagggcaacttctgcatatacaggaataatactaagataaggcctgggcgtggtggctcatgcttgtaatcccagcactttgggaggctgaggtgggcagatcacgaggtcaggagatccgagaccatcctggctaacacgggctactaaaaatacaaaaaattagccaggtgtggcagcatgcgcctatgatcccagctactcgggaggatgaggcaggagaatcccttgaacctgggaggtggaggttgcagtgagtcgagatcgatcgtgccactgcactccagcctgagagacagagcaagactccgtctaaaaaaaagaaaaaaaagaaaagataaattaaggcaaattaaacacaatgccataactttcttgggatgaagactgagggaaatcacagaaagaagagtaaattcaaaggggagaaccacaccagcctcacagaaatttcaggaagcatcgctgaagctttggatgacagtcctatcatgtcccaacctgtctgctggactgctccctggtacggtcaattgggcatgttctagcggaaatccacaggcccactaactcccacagcccacagccatggaaccatggctgaccatgcatggtggtctttacccttgtgccatgagtggtctgaggactaaacatgccttgatcagaagcattaccattctctgaatcaccaggcccctaaccttgaaggttatgtctcctctcccagaggctttcgttatctgctcctcctcttgacccccatagcactgtaggcacagcccacccaccccgactgtgcaggtgacatggcattgccactgcttgtctcattccatctctgtatttcatactgccctgcaatgctgtctgaatgcagggccaggcatgcatttgacaaagaggccacttcagtggattgtcccagagttaatacgcaccaagcaacaagagctactctgacatgggtgctagtgcactgctgtacaatgcctgggattttcctcttttaccttttaggagcaaagatactctattatcaccactatcaacctctcctcttatccctacccctcaagaaagaaatggaaacacgcaggaagttcaaaggccaactcatttgctactgctggagcgggcaaacaacgcacactcacagaaactaaataagtgaatgaggaaaatggagtgcacaaagacatgagaggacagaccagtgagaccagaatgcagtcaacaagagaggggttagggtcgaaaaggcccaggaaaggggtggggtgctaccgaattctgacttttttcctttataggtatttacttatatctggtctcagagacacacagggagaagaagtgggagagagagcatctaacaagatccttgaaggcaggaatgttttcccattttcatttctattccattgtagtgttgagagcagctccaatcatctgaaagagtgaatggctattgggtgggaggcaaagggaaacaaagaaatataccgtgaactccgggacacatcttaaaacttgcctaaactccagagagggaggtactcatcaagtgcagtcttcaaaaattatgtgggattcacaaacagaactcatctccaggtagaggacaagggtccctcccacctgaacatcaacaagtaatgcaactctccctctcctacacaacgtttatatggttgatatccaccaatctgtccatccctccttcctctagcccttgggcgccacactaaaatattacattcaacagaaattagaaacttcaaagcacaccccttcaaaaaatcaacaatacagggtacggtgatgaacaaaaggacattataattttgtggaaaatgcaaatgttaaattacacacagagtaattgccatatttatgtctttcctactgaccttatcttgccagagtaggagaatcagtgtcaagaatgaactctttgccgatttaaataggattcaaatatatatattatgcataataatagtctcctttcacttattacataaacataaaacattaccctccttctattcttgagacgttatgacaatctgagctaatacatttaattcaactcaagtccctgagagaacagaactacaattactatttagcgagtgtctgacccattctgcttgtctctgaaattgtctatgaaactttcatggaggacaccaaggaatcattttgttgtttgacaaaatgatttgactgtgaacatttttaaaatgcttatattcccaacatttaaaataagattttattttcttttatatagatgggagttatttgatgtccaataatatgcatttctatacaaatgcatacagaggtatctgaatttttgagaggtaaattacacattctgtgagtgggtcttgaagcatcaacttgaatgagaatggttatatacataccactggataaatatgcctttgctagctcagacttcatggagtaggccagagataggaaggaaaagaaggaagaaagagaacagagagtggaagagaggcagggcatggtggctcacctctgtaataccagcagtttgagaggcagcggtgggtggattgcttgaggtcaggagtttgagaccagcctggccaacatggcgaaaccccgtctctactaaaaatacaaaaattagctgggcttggtggtgcacacctgtaatctcagctgctcgggaggctaaggcagaccaggttgaagctgggaggcagaggttgcagtgagccgagatcacgccactgcactccagcctgggcaaccgagtgagacactgcctcaaaaagaaaaggggagtggaagagaagggaagagagggcaaggaaggcaggaggatcaactactccaaattgaagaactggaattaaatccatcccacctccttccaacaactggaggaatgatcttacctctagcatgtttaacatggggaaaatatttttttaagtagtccagacaatgataaatacaaagaaaaaaacacacctctggatttaaatggaaggctgcaattccttcatccagagagcctatttcatgagaaaccttttaatagagaagttcttagtaagactatatgggtagcaatctcttgttcaagagataaaaatagaacaactaacctttactaaggtcttactaggtataaggtaccattggtaacatgtattaactcatttaaccttcacaaacctcctgtgaagtacgaagtattattatccacattttactaataagaaataagtaatgtacccaaattatgcagtcaggaaatggcagagctgggattcaaacccaagtatccgactcccaacccagcacccagccattttattagtgaatgagtggatgtgtgaataagtgaatgaatgcaaaagctatgctcgctgtttgtaacttgtggctttaaaggctgctggcagagttttctgtaccacaaaggacagccttatgaacaaaccatggcttaacaaaactatgcctcacagttgtccctcccctaaacacaccccactctgagggagagcctcacgcctgtaatcccagcactttgggaggccgaggcaggcggatcacgaggtcaggagatcgagaccatcctggctaacatggtgaaaccccatctctactaaaaatacaaaaaattagctgggtgtggtggcaggcacctgtagtcccagctacttgggaggctgaggcagaaaaatcgcttgaaccctggaggcggaggttacagtgagctgagatcacgccactgcactccagcctgggtgagagagagagattccatctcaaaaaaaagaaaaaaaaaatgtggcaaagttaaaagtaaggttgatgtctcatttgtctgacccagtcacacaggggccatgtgacaagacagtgttgcggggatttggctatgagatgaaaatgcataagggactgcggagcttcctgtgggccccatgttgcttactgttagaggagaggtgtcctggcaacattccaacccgggcacaaactttacatgaagtttgaagcttcggttagtggcagggtctccacttcctgttccaagatgttgggtgagtctcataattcaagtctcagaggcatttagacttgagtggtgtaatgcccttacaggctcagtgaccatgctgcccaagccaggaacaaggacccaaatctgattttttttaaaaaaacaaaaaacaaaaaacaggtctacctacagggaaaaaaagacaagccattcaaattcaggactgttcccagatgccctatagcactaaggacatgacaaattgaacatgacctgcatattttatgaatgtatctctccctttccctctgcttctcacccctcttctctctttatttctcaagtcttcacttacggatgcagaataggagacacttaggtctgctaaatctatctagactgacttacctacggctctgttcacctcttagatcccaaacacaattcttttcctcattcagtttcaatctgttttcctatatttgaagaatgtgctgttttgaaagccctaatttttactttataggaatgccgagaaacaggccccaggaaagcaatactgtagcattttccaagcagtcatctgggggattcatgaccttccaaaaatttctggtggtttctgacattcaacttcttcccttcctcaaattctccatatccccacattctgccacatatttttaggcaagtatctgagctactaaagaatttaaaaatgagaaaagtgaaagtggccaacagccacaataaaatttttctttaaaaatggcagcactgtccctggaagagcttacacgggtacacacagtatatttcaatcttatcaatcgtgcccacctagattcagctcttgggactattctaactaagacaacactatcagtttaaaatagtctattgtgacagaaaagtacgttgaaaatcagtgaagactcacacatagaatcaatttcccctctagagaaaatcagcgaatataaattcattagggtagttaatttttccatgtaaatagcaactgacatcactgttaataccaggaaaagtaagcagcgtcttttaatgaaaagattataaatctaaagcgaactgagttaagttctaactgtgctcctgataaaaagggaataaataatacccgttcatttttcatggagatgttttaagaataaacaagacaaatgggtaaaaatactttcagttctcctgaataaggcactacctaatcccaaaacagttctataagaaagaaagaaaaaaaaaaagattggtgtgttctcggcagtttcaatgagggctatgggcccgagacgttttaaaagcagaaaactgttaacattggagatatattgtcaaaatacatttccctttggttaaggaaaggagagagggagggcttaaagggtggagtggaaaggaattgtcatcaaagcattgttaatatgaactgaattatattacaatggcgatgcttcaacatggggaatgaaaattgttttgtattattgtggattgacaatatgacaatcgttcattgaaagtggatgacagctgtagcattatagctcagtgcacaacacaagatgaatgagtgttacaagttcttccagaatgggcccttatttcgcaagagtccgtttcatcccaaaataaatacatgccagtttttcactatctcagcaaatttagcatctctttacaaaccaatgtgctaccagcggcctcaaagtgcctgtgtcatgtccctgcttagtggatttgcagcagctgtgaaatgtcaagtcaaaatgccatggaagatctatacaacgcctcagcagaagaaagggcaagaaatggtaaaatgcttatgcctggacatgtgtgaactgacgtcaaactgtctcccgatccacaggagtactgttcctgaatttctgtcttggcaccaggctcattccaccacagacatatgagagtcatttgtgtgcctcttatatcaaactactcacctaaaagaagtaacaccatgtaagctacttgaaattaacacacttcagaggccagagatatttacatatctccttatgtgcaacaaaagtcatgcctgcttacttaacaaaaagaaagaaaaatcaaagaaaaaaagcacaaaaactactcaaaatatcatcacagagagaaagagataagccttgttcacattcacatattagtgtttttcttcccagttttaatgtatttttaaaaaacagaatctgggccaggcacagtggctcatgcctgtaatccaacactttgggaggccaagatgggtggatcacctgaggtcaggagtttaagaccagcctggccaacatgatgaaatcctgtctctactaagaatacaaaaattagatgggcatggtggcaggtgcctgtaatcccagctactcgggaggctgaggcaggagaatcgcttgaatccatgaggtggaggctgcagtgagctgaaatcgtgccactgcacttcagcctgggcgacagagcaagactccaactcaaaaaaaaaaaaaaaaaaagaatctgctatatattgtgttctagtgcctgtttttgtttgtttgttttttttaatattgcaatcaatgtattgggactttttttcaatctaaaatattcttctaaagtgtaattctaaagattatatgtattccattttctccatataccataacttacacagctaatctcctgtggttggacatctatgctccttgcagcttttcactataaaaaataactcagctactatataatgttttcacactttctgactaatttcttagaaaaaaatttataaaacctgtactgatttcctatgatcctgagtatggcaacactcaaagtaaacctggggcagcccttggaaaggggtctcgagcctcactgacccatcagaagagcctctgaagtattggtaagagcagctgaagagctataaacaatgggcaagttctccattttatacttagagaaaatagaaccacttatcccttaattgccgtggcctagtcttctagggttaagcgcagcaacatgttttggtgcgtgagaaaaagaatagtatatgcaaagggagaggaattgcatgaatattctctatgcttccaaagtcaatatgaaatataaatgccctctaaaaaccctgagagaataataaaacatgggagttatttatgctatggtctaaatatttctaattatctttcaggcacatggaagagctgtacttcctggctcttgtgtggttagatgaggtcatgttactagttctgacaaataagttgtgagcagagtgatggggaccatttctgggcagggacattaaattgctgatgttagaccctctggagctctttctccttcagcgtaaccactagtgtgagatcgtggctagttttgtgagaatgggtccctgagtaacaatgataagcagaatctcgtctccccaccaacccacaataaacatgagcaagaactaaatttttgttgctttaaaccactaagatttgggggttctttgttactataccatcacctaggctctcctgactgataaataagatttaattgaacttctttgtgatctcattatctaatttaaaatattcacagaaaacttcattcttctctacacatacagtttgaaaacctggcgaattatagacataatctttcaggttttctggtcttcgttacgtaacaattcaacaggcatttcttcagtgcctactggctgcaagacagttacattaagtgagaaatacaaatactgggaaatacaaagatgaggaagacacagctctgggcctgaatcacttaagataaagtagggaggatccggtttcacattttctacaaaggaggaatttagggttggcaactgggtcgcaaagggcagggggaggggtaggggggactgtactgaagctgtgtttgcatagtaaatgcagtctatatatattatatatttatttgaggcaattttgcagagaggctcgtgtggaatataggagagtggctaaacacctcctctgagctgctgttggtactaccaagggaacagtaaagacaactctaagtagaaggtggaaagttctgaaggagaggtcggaaaaaagtggccatggtgtttcgaaggactggaagatgccgtctgagagactgggagaagggtttcagtgaagaaactgcatttgagatgggcttttgaggccaagatttccacagggagagatcaggggagaaacggtctggaaggagggtgccgcctaagcaaagacacagggggacaaagcagaggactgatcaggtatccagagcgatgtcatagctagtgcctagacagactgttgggcaagtgcagatttggggggaacgcactgagggacttagagggatttgtgcttggctggctgagttaggaaattcagggcagcggaggtgggtgtgaagcagggatttcaaggcagagaattatacaccaggaagaagagaagcaagaggagctggtcctggcaggtttacttggcggaattgcagcgcccgtatctgaataatgaagttggtgaaaccgagagggctgcaacccagagatgaaggcgcggagccaggacgtggctcacgctgagcttccagctccaaactctcagcacagggctgagcacaaaatagaagagcgatgaatgaataatacctaataatatcccaaccaaccggccaactgcaggacaagccagttttacaggacttgccggccagtcctttatttttaaacttctttgcccgctcttggagcttgagtttgatatttacacccaccccccacccccaaaatgggcacagcagaagatggacgcgctgctcagatctaagcatttggatacctgtaaatagctctggtttagcttggaggagactgaacttaaatggagtgaagtttgaagactgtctgtgaattttagctttaaatattgtaagtcagcgctggcggcaatggccatctttaacttcgtgatactaagaaaaagataggctcttcagacaagaacaaaaacattccagttctcaacatttggtaaggcttttccccaggaattcccttttgcttaatctgaccccacatacttcctttaaatgtccctttacgaagacattttagttttggttcaaacaaacacaaaagttagtgtaaacgctgggaaaaagcaggtggagtgggagactaatgatcacttttctgtgtgatcctgagtgagtggactggatttctggcccaatagtagggcagtatttcaagaatgaaagggaaatttcttgagggaaatggacagtttaaggatgaatatcattcttttgatatcttcccaaaacatgtgcaaattcagcaagaggttacaggaaacctcaatacccttgattcagaaataaacacaggttatcttttcaaaaggcatacaagtgaccaaataataaagccatctccaaaaggtcaggagaaatttattgggaacctactgggcatagaactgaagaaagtctccttgtaactgggcttcccatggttgcaaaaacagtgggtgccttcactaggtttattaccaaagatagcaaatgttttccatggaaaacttaactggaatctgttttgtcctaaggtcagatctacaaagccataattacccaggtaacttgggtctgatgttgccaaaaatatccaggtaattacaggagaaaggtcatttcctctgtataatctcaactataccactggctgtctatactggcagttatccagttaagaacagcctttcacatttcactttgtgcttgcttagaccctgccaagactgaaaatcgtaacgagttttttaaaatcccctttataaatattccccttcccttgccccattccctaggatgatctgatgacttcctcacaagacgatatacggaatactttgctaatttttacattcaaaggaaatgctttctggaaagaatactgtgagacagaaatgaaacaagaaaggtgaagaggaagaatgaacaggggtgccaagatgtgcaaaactgtggggattcaaagattcatagcaagagagaaagaaaaagagagaggagcaaagcagatatgcaggtcaacagacgtctttattcagagtttgagctttgtcaacacaggcagtttgggggcagaaagaagcgcatctgctgctctgtgattgcacaagagaagctaccactccttttcttcacaaagaaaaaaaaatggcatttatcgcaagtacagcaaggcatattaggattcacctcccccattctttcttccctcttcctcctaccatctccctcgccgcctccctttcctgttggaaaagaaaaggtgggagggagaggaggacccaccggtcacagacaacgctgtgggattctctttcttcagcttttaccagcctatgggggtcaggatgctattggttcagctttatgtgtgatatggtgcctctcacttagcaacagcgagcaggagaggcaggaagcaacgccacctggctcagcaagtgtgcggatggtttaaaacgagccactcactcacagggagaacagaggaggggggaagagagagcaggctgagcttaatatattgtactattaagagcaaggcttaatcagggtgttaacaacaaccaacaggcaggctatgggggaagagcaaagactggacaggagttatttttaatgagtatctacgtataaatcatacatgttgccttcctttttttttaaaaggacagactacactgtgctgcctggatggtgggtggggagaaagatggttatctaggcaaaaaataagagataagatgcatctaaaattctacagtgagtttactcggttttactttgttttcacaccagggtgttactagaaaagaaaaagtaaaagtgggtgtacttgaaaaagcaattggctacgtaatcacaggatttttttttttaattagtcaacacagtagctatttctaaatcttaaaatccattttagcatttgaaaattaactttctggagtggaaagtggcaaaagagaaatctagcagagaaacatctctgctagaaagatttttttttcctttgcctcctttgtggtaaaagggaaatttctaagaaggatgctgatagaagttctgaaagctcacactgcctgaatataacagggctcattgccaataacaacaaggaaatgtattctgctattccatattctttcatttctcttaatagaatttgccttcccctctattctaggtcttcccgccaaactttagaaggattatctcacctacttatccatcccaacccaccccactgcataacatctaacagcctagccttagaccctaaaatataaatgggaaagcatccttctttcgttcgtagagaaaaaaatgggagtcaacttgggtctttcattggagtcaactggtgccctagagacaaagcccaacactctggagggcacagatgggcctctgtctgcccttctaaaccagacccaattaaccccttaggctctgaggagtaaaagccactgactacagtgacacctactgctcggggtacagctgtacatcctcgcaccgcctcccaggttctccaaagcagccatgtgttccactgccgtgggctccactgaacacatttctctctgctctgggctaacacctggagaaggaaattttcagccccctcattctaaggatggcctctgaacctataaatcagggccttctataggcaggagtcctcacccatgggaatacaacacgctgtcaatctataaagtgaccaactctcgcagcgattctatacaaaagaggcagaaaacatagtctgagaagagcccacacctccttcagaatcgctaccttgaaattacttgttaatcctgtttgatacccaatgaagttatcctggaaaaaaaatgaaagttttactcagtatccactgaattttgctatacagggaaaaatatgatatgaagcactagtacaatcaaggtatctagaaactccacttccagtttatacaatagcttgttagttaatccatcccttctactctatgcatttagtcagatggcagaaattccctcccattgagaaagaaatccatttaattatggaagtcagttatacttctctgaaggcatagcaaaaattcctctatgttgaggacaatatctataagtctaggaagggcaagaaacaaaatcattaacagaacccttgacttaccctaaaatagacactgagtttaaaaccatcttaaaggtgtcaagagcagtaagtcagatgattataaaattaatggttcaggccagtcacaatggctcatgcctgtaatcccagcactttgggaggctgaggcaggtggatcacctgaggttaggagttcgagaccagcctggccaacatggtgaaaccctgtctctactaaaaatacaaaaaaattagccaggcgtggtggtacatgcctgtaatcccagctacttgggaggctgagacaggagaatcgcttgaatccaggaggcggaggttgcagtgagccgaaatcgagctactgcactccagcctgagtgacagagatgagactcagtctcaaaaaaaaaaaaaaattaaattaatggttcaggaggtacagcttgtttcatttttgacaaagaatatctaacgaatcttcaccaagataggtacacactgaacagaagtaatgctgaaaatttaaatattacccttctttctggatgcttgaagtgttatgcaaatattttgctttttattcccaaccattctacttggaataactggatgttacattgtgctattctcattttcccactgagaaacagaggagctcagcagttcatccaacgtcacagagcaagctagtggaggcgccgggataagaaccaggcttcctgatttaaagcccgtgacttagccactgggccaccagaaccaggcaattctctctgaagccctgtgaggactatctcagacctcttactgatacctcacccctgtgtgttaatttgtgttaccgtctcagagttgcaatggccctatttccattcttctttaagtttcttactttgtgacctcatttatcagttgctttcatgaaatgggttaaggaaaaaaatgagaatgtgggaggcttaagtaaaacctacgaaaagcccagaaatggttcacacataagttaaataaaaggctaaatttacccacctatacctacctaactctaatgttttagcactaaaatgagtattaagtgaaaggatacttagaaaagcagctatactggctctccactgagacacggatccacaaggtggagccactgcggggtagccagctacataaccaattaatagcacaacagtgacattttcattcttttccatagaatttcccactggcagaacacacctgaacacacatctgtgtggggtgtgcaaagtgtaattgtgtgactctgccatggatcacctagaccccgtgtaggaatctgttcagtggggtatgggtgttcaaaatggcatccttaaatgtccctcaaaaaacccatatatttctttttttttttttttttgaggtggagtctcactttattgcccaagctggagtgcagtggtgtgatcttggctcactataacctctacctcctaggttcgagtgattctcctgcctcagcctcctgagtagctgggattacaggcatacaccaccatacccggctaatttttgtatttttagtagagacagagtttcaccatgttgcccaggctggtctcgaactcctgacctcaggtgatccacccatctcgccctcccaaagtcttgggattacaggcgtaagccaccgtgcctggcaaaaaaacccatatatttctatttgatgagaagctccttccctcaaaatattcttatatctgcaactatttcctcctaacagggaaagtgagtaagtggtgataaatttgtctccatgaatcagttcttttccagaaactgttttaatataaagcccaatatccagtatcaccctaacagacagcacttatgaggtatatagagctgaaagaggcccacagaaaccccctcattcaaaacctaaaagtgtattaagtcaatcatgataagagacaaatacactctgggtagttacacattcctcagacggtaatatgaacagcagccaccgacaactggtgctcctggtttagtgttggataggctgtttggaaacttgtctctccaaacagccccttccaatattcttcatgtcttcatggcagcagcattctctcaacaccaacctggaaatggggggcactcctactactccccttcatctccttcactgactcagcatgcccctcggaccactgctttggaatgtctcacatctggctttcccattcccatccgaattaggtaattctgtttgggagcataccactttacaccagtattactgcaggggccacattcccagatcctggcttttctcctctgggccatcgggctttgagataccttaacttaatcgtgccatatctaaagaacttcaccacaacatggtccatgcaattctacttttataaacaaaaccaaacatggtaacatacatgcatgcacatatttattttaaaatttttgactgaatatatcaggggccagcaaatctttttttctgtaaagagccatttagtaaatattttaggttctgagggccaaaggacaaaatcgaggctctaatgtagggagaaaacacatttctacaaatttttggttggcaaaattcaaaactttatttctggacactaaaatctgaattttgttcaactttcacatgccatgaaacattaccattattttgaaaatcttttcaaccatttaaacttgcaaaaatcactcttagcacatgggccatacaaaacatcaggcaggctagggttttggctcatgggtcagaatgtacgtcaagtggttaaaactgtggttaggtctaagaagaggaagtagaacaaaagacaaggttttttctcttcacttttaaattaagacatgtctgtattttattatagacatatattacttttatgttctgaaaaacagtaacatgggcaggcgcagtggctcacgcctgtaatcccagcactttgggaggccggaacaggcagatcacctgaagtcaggaattcgagaccagcctggccaacatggtgaaaccccatttctactaaaaatacaaaaactagccgggcatgggacgcatgcctgtaatcccagctacccgggaggctgaggcaggagaatcactggaacccaggaggaagaggctgcagtgagccaagattgcaccactgcactgcgacctgggcaacagagggagactccgtctcaaaaaaaaaaaaaaaagaaaagaaaagaaaaaagaaaaacagtaacataagacttgattcattggtttgttgattaaaataaagatttctttagagctttcagtttcctccatattcttcctatttaacttagtttctatgaggatggtggtctcttcattatctgcctaagatgccttgcacctctcctgttttcacacgtttgttgcctggcaaaatcacactcatatttcaaggcttatttcttatttcctaacgttctcctgcaaggcttccacatctatgacagtatggggaaatcttcagtcatctgatcatcacttgtcagttaatttagtgtgtgtttaatctcgtctcctaattagtatatcagctccccacaggcagggaccaccttagaatcttcagtggcctccaaggcaccaagcacagcgatgagtccccacctctgtcttccacaaatactggacagctattgatttggtcaacctatgctaaaacacaactgtagaatatttttaaagtgtactagaatcagtggatgaaagaaagatagaaattttgtcttcatttttaaacatatttcttaacttttagaactgtccaacaatgaaatatgctacctcttgaaataacaaatttcctgacactaaaaagtattcaaaacacaagtgtctgaccatctgtcagggattctgtagaaggaattcctgtattatttaggtcagaccacacggcctctaaagtcccttctcactcaagaatctcttattctgatgaactctattcccctaccccaaatatctcatttatttcttaaaattaagtgattcaaagtaacaggggtgacaagttcacaacacagataataaaaaaaaacctacttctttgtcattttttgaaattctatgggtatataaagatggtattaattagtttgttttaagcaggcttggtatgtatgataaaccaccagcactaacctgaagaaaaaaatcccagagcagtgagaatttttttgccccttatttagaaagatccctggggatggtttgcttattgtttttgtttatttgtttgcttattcttttcactatattactgggttgctgtcactaatcagctgcctggacgacaacatgtaaatcataaatacatctatattttgcttatcttgaatctggctttctagaacctttagaattctgcaaaatccccagattcaaaaggagcttagaaacagatattttaccacctcttgggaggtaaaaatatagctccttgagcactcagctacatgtaaacatgactacaaaaagccaaaggtacaaaattacacatcatgagttctttcatcaagtatatctactcagtacccaccatgggcagtcaggcagtgctctaagtaccagagacagatggtgaccaaagacccagatcctaactgaaggatttacactggtcaccaaatgaagggccagttagtagtttaaaaaaaaaaaaggtaagaaatacattgactggcttgcagtacctataaaagacattatccaaaaacctagaaatggagaactgatgataggagagaaaacagaaaaaagaaaagcacatggaaagaagagaaaggggaaaatgaggcaagatgagaatcagctgcagcaacaggggtgtgtggcattagaagtaagggctgggagccccagacactgacagagaagaaaggatggctgagatgttcccagaggccaatactggaaagcactggggcgccagctccatgtgtgtatgcagtcctccatgcggcatggctcctgctgcagggggaattccctttaccaaattaactggtgttcagagtaagaaatcacctctctacattccagtttcccaagtactttctaagggtgtcatgacatctgttctaaaaagcacctatttcaagtcctggcacacagcatgccctcagctaatcttagttttcttttcttttcttttttttttttttaaagacagagtcttgctcttgtcgcccaggctggagtgcaatggcgcgatctcggctcaccgcaatctctgcctcccaggttcaaaagattctcctgcctcagccttagttttctttttgtattctcctagagtcattaagaaaaggttctggccctgcgcggtgactcacgcctataatcccagaaatttgagaggctgagacgggcggatcacctgagatcaggatttcgagacccacctggccaacatggtgaaaccctgtctctactaaaaaataccaaaaaattagccaggggtggtggtgggcgcctgtagtcccagctactcgggaggctaaggcaggagaatcgcttgaacccgggagacagaggtcgcaataagccgagatgtgccactgcactctccagcctcagcgacagagcaagactctgtctcaaaaaaaaaaaaaggttctatcccactctaagtcttctgatcataaaaaccaatcaggagttacaataatagcttatgattattgagtgcttactctgtgcaggcacgaagccaggaacattaatggattatcccaacagtcctattacatggggtccattctggggcaacaacaacaacaaaaaatgcagattagaaaagcttagtaacttgcccaaatcagaagcataataaataacaaagtcaggatttaagccaaccagtgcccagcctgggcaatgaagcaagacccccgtctctacgaaaaatttaaaaattagccaggtgggatggcatgcatctgtagtcccagctatttgggcggttaatgtgggaggatcgcttgagctcagaagttcaaggctgcaatgagctatgatagcattccagcttgggcaacagaacgagatcttgtctctattatatatatatttccccaaaagactaatatggactccaggagtatttgccagaagatttttttttctgaaattacagaaagaagacaaaatctttttgtcttaaatcttttctgttttaccaacattaaaacagaagaaacctaagaacagccccttggtcagcaaaagaatgttctaaggtgatggctaagataatattttatcagtctttaagagaaacgcaatattccgcatagttgaatatccagataacttgaagattatcgctgaagtaaaaggcacttttatggaaatctttctaaaacattagatatttatattcctgtattcttaaacagaaaataccatattcttgatggtttattatgagatcatcgttatgaatattagtagtaataatgggctgcaattcaattatctttgggttggggaggtattaaactcattagggctttttgatcttgcattcaaggaccccaaataccatgtcttccaggtctccaagtctgctttttgtatttcttttcttcctgttctctgctatttttgtccttgttgctttcaccctgcttctagtcttcttcctcattttatacatggttggcttatggaggatctcaaagtgactccatgccttgccagggttcagtgtgaaggcccccaccgccaccaccacctttctctgagttgtggggttttttttttcaactcacttccaggttcagatgactgaggttgatgaaagacctctgattaaacgtacagttactctgtccctttttaaaaatgcttttttaaaaaaaatggaatgtagattactgaagaagttttactttattcatttaagaagttaaaaggtaccataccctttcaaaattaaatattaacaaataatggacaaggaaggaaaaaattgcatgactctttcaaaaagtaaaatagacccatgttttccctttggaacactttgtctttgaagcccttcaagctcagagtacttttttttttagtagtgggtctatgttgcccaggctggtctcaaactcctgggctcaagcaatccttccacctcagcctcccaatgtgctaggattacaggcatgagccaccgtgcctagccccaagtttagagtatttttaaaaattactaatttaagtttctttgctaagaaaagagaacctaacatttgatgtaattttttcattattcctgctgagtagatagatattggacataaaatgaacaatcacatatattatatataataaaattatattgttagatataatacatgtatatatatatatatggcattattgttaatctatattttcttagtatttgtatcttgcctgtctcagttatttcatgttctcatgttttaacatagtgtctaactcatcatgttctagctttctggtattcccattattttaatccactatcattttgtttcattagtctcctatttgagcatttaatttgttttataatttttttcctgttcttctgaattaatcctttgggtctaaacaaggaccttcatgttattggcccaataagaaatccaaacacagttagaacagagaataaaggaagaaaaagaaaaagagaatcggtatgagacaaatgaaagaagagtctggggctatgttttctcctgagaagatggcatcttctatataaaacgccggtaatggcatctgttcttctgcatatgctgaacaacactgtgattcaggtgaagattgtttttttcaatgtgatttcacttttgcctagattatttaaatgcagagcagaatcagaaggcagtgctttctaggacaactctcattatttctactggagctttactttcatttaaaaaaaatctgtctaaaagaagcaaagaaacaggtacctttatattaccaaaagctttagggcatctttaagcttgaggaagaaaagaaaacctctttcttactcattgtaatatccctagcacagtcacgggagcataccaggtaaaatcaacacagtcacaaggcaaagtggggattcaatgaacacttctgagagcaatgcctgctggcagggagggtgttcctttccctgaaggaaatcacttctctttactgtacacagacttatggatggaaaagtttcaaacatctgataacacccagttcctaaggaatgtgctcaggaacagctgctgactgaggatgatttagggcaaaggtgaaaagaaatgctctgacattctcattatctgattattaaggagattttaaaaatacttattattttaaaaactcataaaagaaatgcataaagaaatggctgaatgtcaagaaaggaattaccacatctaggccagaagatagtctgatataggtcaaatttcataaattcatattagcatattcctcactgagaggaggctggggtgaaaactgacctatataattttaagtgtgtctacaagagctaaagaccaagataagatataggaaaaaattaaaggatttgttagttttgcagaaattgtcagggtttctatagcattataatggcaaaatcaaatatgcatctttttcaaaaagaacagcaaaaggcatctaaagcattggcaaaaatgtttttctccaacaaaataattatgatatatgaaagtcaaaagatccccaatttttgatatgatgtgatatatatgatagaatatctatttttatttcaattaataaaggtctagaaaagtttagctggggtttgcaaggacatcaaaacaaaggaacaatagagccattagaagctacaagcctaggctgggcgcagtggctcacgcctgtaatcccagcactttgggaggctgaggcgggtggatcacctgaagtcaggagttcgagacaagcctggtcaacacggtgaaacccagtctctattaaaaatacaaaaattagccgagtgtggtggcgggtgcctgtaatcccagctactcaggaggctgaggcaggagaattgcttgaacccgggagggggaggttgcagtgagctgagatcgtgccgttgcactccagcctgggcgacagagtaagactctgtctcaaaaaaaaaaaaaaaaaaaagtcacaagcctgaaatcaaagtcaggcctgtgaatcaagatgggctaagttctcttaatttaacccccaatatgcttccccaatacagctcagtaacacagttctgaaaaacattataagaatttctttgaacagggcattagatctttgaacagggcatgtctagtcacagcaaatgcatagaatgccatttcaaagacagacactaaattaaaaggaaagttaacagtcttgcttattttacggatttctcctacaaagagtgtcagatcctttattaatgttataaaatagtgtttgaataaccattgcctaagtaaaatgtcactattataaatgatattctgatgccctcaaatattctagaattcatttaaatacaggtattgaatattttgttattcatataaaagtaaaatgtttgacctattcctaattacgatattaatataacaatcagcgtgaccacatataatagtggaaatctacatacatatgccattggatttcagtcacagggcccaggttctagctgaaattcagcagagcatcatctgctaagttaaataggaagggaaaagcagcaactggagccccagaaatctttgttttcattccaagttaccatgaagaaatatgatggctcaggttttatacagtcaggagtgacaaaaaggcacgcacgtttgatgtggacttctacgtggtccccacaagcagaattggattgtcaaagctctactcatcttccctttatttttcctgttccctcagccaccagcaccaaatcctagagccgtatttcatttttcagtgaacaccctgggaacagtcatcgctttttacaggaatcggactcaaaagaaaacacagtccctaagtaagttaaacagttcagtgcaccaaggagatttatcagagagagagatctgcctaatgaaagtaacctcctaactacgatatgggagactgcattcactgtctagtcaaaaaacatactgcctctgatacaggaggaagacagcaatctagcacagctaagattggcaggaaacaaaatgctgttcttagaagttctggtatgaaagaattctgaaggatttctgtaatcaaaacaatgatcaaagttcaccatgatgcaagaattccagtacgtcaactcaaggcaagtaacaagaccaagtttgcatgcagttactaaaatacaaccttggccagtaaaaatttgtgccaacctagacatagttttcacctatttaatgaaaaataagaaaatatgatgttcagaatggaaatggttttcatgaggaaggctgttgcttctctcagaagcggtcaccttagtccaaagcttgttacttagacttcatttggtgttggcagaaattaccactaactggcaaaaggaactgagaagagaatgacaatatggtgcctgtatatgcaactgccacagagcccagtgttttgacattgttactgaaacaaactcaactatttatgagagctacattgaatcagacagttggtgtggcagaaaaaaacatctgtttctgaagtctttttgtctagaaagtcactaagaaaggaggagaatgtacagcaatccccaacacaaatacctccaaaaaaccataaatagcattgtcaagtaggaacagatacctcccgcccccattataacaacacccagcagacttggttacttaggagcctcagatgacgcatcactgtggacagcaatctctcttctggatagttcaaagtttccctcctcacacactgaaaaaggtttttttaaaaaattattttgagtaacataccttcagacccttttgccttcttaagcagagaacatgaacaaaattaaacttttttcttgatctctggatcatgaaaatcagacagtttaacaggcagtggtgaactgtctcccacaccatcatggttccaggaccagcagcactggcatcaccttgacagaactgcaaatactgtactcagacccctcccagacctattaaatcagatattcttggggcagggccacgctatctatgtttaagcaagcccacaagatgactgtgatggaggctaaggtttaacgaccagtgtcagctactaaatgactctaaattgctgcgctctgagagttttctgtctgctttcaatgggttttcctactacttgctattattatttatttctgcccaccaggtagctgcctttgttagttctactctcttctaatttgctgtatctaatctgctataagcttagaaatcagttgttgcagttgctaaaatcacatatacaatacaaataggtaggatgaaatgagtaaacaactgcttaggaatgggaaaagcaccgctatgaggaaagtgcacagttccaggacatagattttgagtatctattttggttatgtagaagtcttttccacttatttcctcaactgcacagtacttccttgagtctactcatcaggagaagaggttgctggatactgaattctggtcgataaacacgtttctgtagtttacaagtgagtaactgcaacatttatcttaatatttttcatagaaagtattaccactcattaaatatttgctatgtgccaggcactgtgctaaacattttatatacattatttacttagctcctcacaacatgatgcaagtattattagccccattctagatgagaaaacagaggcaatttgctattgagtaatctgcttaagaccatagggctattaagaagcatggccagaactcaagttcgctggatttcaaagccaaacaattttacctatttttattaatatctcttgaccatgcaggaaagagacagccaggccggaactcaaaacttagaagacagagacacagagagggaatgaaagccacagagagagaaaatgaatctcaagaggaggacaggactgtaataagccgtcagtatttaaagatgcatagatagatccttcctaggaaataatcaggaagacaagtgactcaagtcatgccattctgtctggaaagccaaagcctgccagtgtccctggtaagagaggtcccctgtcctcctcccacacactcactgtggggccctctcagcactatctctgcttcctacctggtccacattttgggtagccttaatggatttcccaatttacttcccacaggggccaatattcccttttatagcttgctttggggtctttacagttattatttaagcttgtttaaaacacacatcatcttcttatttgcagacatcatgaagttagaatcttccagcagaagactgaaatactgtaactgacagtaactgaccatctggaacactataaatgtcttctttacttcttactttgtttatttgtttgcttgcttgctttaaaaaaaaaaagtaaaaggaaagatttcaagttgtctttcttttagcccaagattttgctaaacatacggtagcactatgatacgttgtgtggtgctctctagaacactgaatatacaaacagatgctataggtggatatgaaataagtcacactaggcatgctgaaagaggttatttaagaatgtgctcatcaagcatcaagacacaccctgtatcttcttagaccccttctcctccttagaactcctgggaaaactccatttcttaccttgtccccatttcttacatcgtccccacttcttactggggaaaatcagacgtaaactttgtattttaataatttggttctaatccatatttaatcacataaatgggcctctgctttctaaatttcaaacaatcccctttgatttggttctttgaagaatctatggtcattgtggaggtatttcaggaaaaaaaatgtattctataaagtacctactgcaatgactgaattgagaggtaaatccaattatttcataagcaaggtatcttagcattctgatataacactcatgccaggggaaatgtaagcaggacattcaaagccttttgcgttttgataagatgaaatgtaaagggaacacaagtatccaaactttctcaattggtggcacataaaagtgctttactgatgtgtaaatgtttctgttgtttacatagttgggttagagggtggctttctgcttttccacacttcaagaacgagttttttgggctgattcctcgatgaaaggtaaaaggtaaccatccagcttgggcttctagttcccagcagatcaataaggaacaaaacttgagtcccttttgactctgctgtggcctggtcctctttggaagccaatatttaacagtagagtgtattcatcagctcagtctgtccctcaagaagaactcgccttccttctctgtccacctatcagcaaatcaccacttctctctcctgaccttcatccctactcgccttaccaaaaacaacagaacaacagctatgccctaaaactgaggggagacttataagttttgtttcttgaagctcttctaattactagaaggtcttctcaaggcccttttcaaattgctggaaggctccaaagattccaaactttccatctgctgaaaatgaagattctttcacccaaatcactcaattactctttaaattgaaaacagagatgacatttttctaatcaccaccagtcagtctggattgaggtcgtctctgccttttcacggacatgtaaagtcacttgtggggtaaaactcttatccatgaagttgtctctaccattaaatgccaagacctagtagcaaaacagaagtataaacttgcttttctacagagtaaaatccaaaagccactgtgtgaagttacatatagtgagagatgtgaaaagtatacattaaattaacattgaacactcagttgtatttggacttacggtttgctttttttttttccccgagaaaaatttcatcaaggtagaagccgatctctctagtatttattttatagaagcggaaagaaaagaagtaattattgtacatatcagctggctctactgatggtgctgtttctcatataaaacacagcccattctttctgcttttggaaaccaggagcagcctttcacccacagagctgtaacttttcaaaatcaacacttcgtggctttcccatcttcaagaccttctggaataaactcgatgcagacagtctctgctgaccttcaccacttgtcagactagcaaggctagcagagtttgttgtgagaatttggaccctgactcatccacattaaggtttttgaacccactctggaacagacctgccttatgtctctcctaggctatcaaaagttacaagttgtattccctctttaaaaagtaattgaactcatgaatatcaaaagctatagaccaattgaatccatgtgagattattctcatcataaaaagggttttcctctgcccagcccacctcaccaccacgattcccagcacctccatcaaacaggaaggtccataaggaaacataccacagcaccgctcctggcatgaagaggctgctcaataaatatctgctccatgcataaatgacatcctaactttacaaaaggatttactcaaagttttcctcatttgtaagagcttacacagacctctgatatgtgcaactggtgtgcacactgttactggtgactgacccacacacaattttcagaaacacatccatgtgtccactaaccagaccaaaaaagatgtgtgaaaataagtgaatcagacatatgaaacttcccagattagacctttgcttttcaaaactggtgtgtatgagaagtgaatgaatttgagcagcaaacagacctgagtatgaatcacaactttgttatcaaacaggactgataatcactctagccttggctttctaacaatgaaggtggggataatgcctttgaagttgctgtcaggagtaactacatcattaagtagctaacatagtgccttattgcatagaagacatggaataaaggccagctcctgatatgtgcaacaggttccctggataacgttggcatcgctctacttgctgttcttgacagaggttttagaaagcaccattctgacacttaaaacccagagtgctccctaatgaagtacagacttctcaggccacacaagtcagcttgcccaatttgacatgtatgtggaaagatgtgccctaggaattaatctcagagcagggaattccaatttagttcagaatacaaggatatccacaaaaacaggagcaggaaaaaaaatcgtattgctgaaaaatgactctatttcctgcaaggtcaccagaggcagggaatatacacagcacaggaggcctgtgtggacctggcctagaatagccaaacacttgtcaggcagtgccaggactgccccagatctacctatcccaccaactgctgcttcctttctgggagaacccatccaatttaagtctcaattagtatcagtttgaacctaatatctgcacatctgtgttgagagatgaactgcaaatcttttagtgccaatttttcagatacagaatgaaagggattttataccacacaggctatttttaatctcaaaggtttccaatcttttatgtaaatgggttagggccagcatgacttctacgagcaaccgcaacaataatgttcatctatgaatccctgaataatacattttggcatgccttttctccaatattaaagctttctggaatattttcactagtctggaagcaggaagaagaactcaggatagtaatcaatgaagtcactaaatgattcagccctagtgggccattcagaacaaattttaggggtgtgtgtgtgtgtgtgtgtgtgtgagtgagagaaagaaacagagagagaataagaaagaagagacatagaaaaacatctaagactctcagaaaggatttaatttactctactgctcagggatatgacttgagcccagttatcaaaatggccaagagtttgcaaatctgtcacacagattctagagaagtgcttgggatagccaacaaggttagggagggagacagcatacgtattatttacaataaaacttgctaacaatgtctatatgtagttaaattgtcatgtcctaggatataaacataattaaggtggggaggggtatggttgatagaattaagttcctaaaacagcagagttttctgtattgtctcaatatttaaaaagcatactcaatggccaagattaggcagctaattctatttgtgataataaatataacataagtctgaatttcttcccacatttaaagctttcaaacatttaaaatgtatatttcaggtaatacataaatgtcaatcttaatcttttttttttttttttttttgagatggagcttcactcctgttgcccaggctggctggagtgcaacagcacgatctctgctcactgcaacctccgccttccaggttccagcaattctcctgcctcagcttcccaagtagctgggattataggcatatgccaccacgcccggctaattttgtacttttagtagagacaaagtttcaccactgcccagactggtctcgaactcctgacttcaggtgatccacctgccttggcctcccaaagtgctggaattatagacgtgagccaccgcacctggcaatcttaacctttcttaatctgctttttgtgaacagaaaggccttttctgacttagccttggaaaccttggaagtcacacagcatcactcccacgtattttcttggtccaagtggtcacgagcccacccagatgcaaggagacatagacctcacctctcaatgggaagagtgtcaactagttttggtgccatgttttgcaactgccgcagtggctttattaatctttgcattctctataatctttgcagatactttactctcccatcaacctgagcacacacaggctttgtacacagtaaatgctttggaaagcatatcatgaattattttctcaaggggaaggtacagtatgatcactaacttgaaggcactcacaaaggaattttcaaagacatgtagtgggtgtgagtgcttaaacaagggtctctctctacctaggcacttttcagactgattgagtcatttcttaaatttgcaagagaatgcaaacaagcactgttctggaaagagaactctaccaggagctcactctcccagtgttagaatgaaacgaatatggatttaaatcctaacccggtcacttccaagctggactttaaaatatattactttacctctctaaaatctgttttctcatttttaaaacaataacaaataatatcacctatctcatattgctgtgaggatttaatatgtaaatacctataaaagatgaagagcagagccaggcacatagtggcactcaataaatatgtgttgtttttgtatcattattactatttgaagagtcttaggccactctctagtacatagtaagcattgagttaatgttagctattaatgtaattaggacccactaccctcgctttgtctggtttctatcttcctctctacctccctattgcaaccaaacattgaaagagttgctgacgaattttataatttgacaggtcaaactttctgaacttctcattcctcccttctttatattctgaaaaaggtgaaaaagaacaatggaaataccacaagatgggtagcttttagaaaaatcaggttttctaagtagcttgaataaccacataatcaatatgtgattctatcagcttcgactttacatgggaaaaaaatttcaccttgattattgcaacttcaaaacatttctgtcccatagtagaaggggaaatgtggagtcttttgacttggttgcactatgcaggggctggctttttctctagtagtcaagattgcgccactgcattccagccagggtgacacagcaagactctgtccaagaagaaggagaaggagaaggagaaggagaaggagaaggagaagaagaagaagaagaagaagaaggaggaggaggaggaggaggaggaggaggaggaggggaaggaggagaaggaggagaaggaggagaaggaggagaaggagaaggagaaaggaagaagaaggaggaggaggaggggaggaggaggagaaggaggagaaggagaaggagaaaggaagaagaaggaggaggaggaggggaggaggaggaggggaggaggaggaggaggaagaggaggaggaagaagaagaagaagaaaaagaaagaagaaagaagaagaagaaggaggaggagaaggagaaggagaaagaaagaaagaaaaagaaagaaagaagaagaagaaggaggaagaaagaagaaagaagaaggagccgggatgcatttagtagcagaaggactacagaatagaatacatagtaaaatcataccatggagaaagatcgaactggagtccttaaaaaaaaaaaaatctaggctgggcatggtggctcacgcctgtaatcccagcgctttgggaggccgaggctggcggattacctgaggtcaggagtcccagaccagcctgaccaaaatggtgaaaccctgtctctactaaaaatacaaaaattagctaggtgtggtggtgcacacctgtaatcccagctactcaggaggctgaggtaggagatttgcttgaacccgggaggcacaagtcgcagtgagccaagatcacaccactgcactccaggcttggagacagagcgagactccatctcaaataaataaataaataaataaataaataaaaatctaaaaaagagccagactctaagttttgtgaggacaaggacactgtcttggtcaccactgcatttctgattccagcttcaatatttcccacttagcaagtgcttcagaaatacttgttgaatgagtagcatacattcatgttaaaataaatggttgggaaaaaatctcttcatattttagcccaagtactttggttttgaggcctacagacaatctcattttaatctttagtaagcctgttttgccatcattaaaatgcttctctttgaaggtgagcttactttttcagttcactgatgaagatattcagaataaagtagaacacactctagaagaacaaaaagagaaaagcttcaaaactgaaagcagaacccacaaagaaaaggcagacaaactgccttgtagcatctctacaactgacacccaagaaccgaaatgaaactgaatttgttcagcaaagcccaagtcagaatcataaaaactcctcgaaatactacaaatggcacctatgtgacaatgaacagttttaaagcctcaacactcagtggacaaatgccttcagatgagccacttcagaaggtaggactcctacctaaggcaacttcttcatactttagcttattatctttattcgaacttgattgagacttgcacacacacaaatgacttttcccctctccctttggttaagatagtcatccattaaacatcattaggaagtagaaaggccccttccctctccagaggggaacctcctctgtgctaataaccacacagctaggtctggccttgcagccaccttgcaatgtggcgctggggtcttcgtgggcactgccaaacttcccacagcagataataatgtgccacctaaggaggaaggcagcatttttctgccctgaactccagcttccaggatcactcgcctaggtctcatcttctgaagcctcctttgtctatcggatgcatactgtgcaccttgtcattgttgggaggacaaaaacaactggcgtttctcacaagctgtctgaaagagctgctgcagacgacccatgtgtgcacagactccgcacacactctctctctttctctccctctcttcccctcaggaacaccatctgagagagctgcatggctgcccagaacttgtcccatccagctgactccaccagccttttccttctttagcaaggaaatggatctccagaagacacattcctgcagctccatgaaaccatccaggcacagatacttgcccagctttttaattttacagcttttacactgaggtgacacccctgtccccagccctgctatcgtggacattcccattaaccctgttagttttaaatgttaaaaacagagaactcaagacatctacttttttaatgtcaagaaatgcaaagtggcctatgataataaacataaacacatacataatagcccaggacttaaaaacaaatcccttcatttcttagacccacagccacatagatctcacagtttaaaaaaaaaaaaaaatccacagtgaaacgtatcagcgtacattctctttcagatccaatacacagaaaatctttacacttataattttacagggaccaggattagagagagagagagagagagagagagagagagaaggcacgcatctgctttatgttctcagtgaccagctgaacagatggtcaagaatattgttagttaagaaagctctcattcatgatcagaaagtcccttgggcaggctggtgtggggtgcaagaatgtcctagaatgtaatatttgaagaatgtgttcatgtctgagatatgaacccatgtggtggacgtgggggaggaagggggagaacagacagcctgttgtgatccaaaaagcaaccacaagtacctcaacattggtttgtcacccagacacttccggctttcattccacccactccctcaacagtattaaaagtgaagaaaaccattgataggtctcagtagctgccataatccttccttctctagacatgagtgcagtcagccctccgtattcatggattctgcatctgtggattcaaccaacagatattccaaatattttccaaatatttgaaggaaaaaattatgactgtactgaacatgtacagacttttttcttgtcattattctctcaacaatacagtgtaacaaccattcacatagcatttacattgtgttaggtattataagaaatcaagggataacttaaagtatacaggccaggcgtggtggctcatgcctgtaatcccagcactttgggaggccaaggtgggcggatcacctgaggtcaggagttcaagaccaccctgaccaacataaagaaacctcgtctctactaaaaattcaaaattagccaggcatggtggcgcgtgcctgtaatcccagctacttgggaggctgaggcaggagaatcgcttgaacctgggaggcagagattgtggtgagccaatatcgtgccattgcactccaacctgggcaacaagagcaaaactccgtctcaaaaaaaaaaaaaaaaagtatacaggaggacgtccgtaagttatatgcaaatacaacaccattgtatatcagggactttagcatccctggatttgggtgtctgtcagggggtcctgtagccatcccccatggacaccaagggacagctgtacctcaccagtagaaaaatataaaagggaggtagaagaggatacgctgcatgaagttgccacttctttgtcacttcttctgggctaacacagaagatgtaaaaagaaacagggggtcctatgtgttcatcccaatatgagcatttcctgggtgaaatttctctaaatttaagtcgcctctcaacctgaccaacagaaagtgtgtttgtctagggagggaggaggatggctggtcatgagcactataaaatctatgggagaactggaaatcaacaaatctgcaaccatctggctttccataccaatttatatccatgttttcttttttttttttttgagatacagtctctctctgtcacccaggctggagcgcagtggcaagatcttggttcactgcaacctccacctcctgggttcaagcaattctcgtgcctcaacctcccaagtagctgggattataggcgcctgccaccatgcccggctaatttttgtatttttagtagagacagggtttcaccatgtcggccaggctggtctcaaactcctgacctcaagtgatccacccacgtaggtctcccaaagtgctgggattacaggcgtgaaccacctcgcccaacccttcactttttcaacaaaatttcttatagacttccatcagagagactctggtactatagatgagttccctggtgttttgatctttctcccaccctgcagtgagcacctacttcctggctgtgaggtattgtgccaggcacccacagtatacaagagacatgagatatggggatatccataccctccgcctgccattttggggacagggggtgtatgtgagtcaagcaacattcacagcttctaaagctagaaaaaatagtcttcaaaataatccatatgttgctttttgcaactcattttagtgccttgattggaaagttctgaggaggatattaatgagaaactggggtcaccaaaatcaaacaggaggcctggtttggagcagggagcaaagtaatcagaaagaggacacgtggccaggtgtggtggctcatacctgtaatcccagcactttgggaggccgaggcgggcagatcacgaggtcaagagatcaagaccatcctggccaacatggtgacaccccatctctactaaaaatacaaaaattaaccgggcatggtggcgctcacctgtagtcccatctactcgggaggctgaggcaggacaatagcttaaacacgggaggtggaggttgctatgagccaagattgtgccactgcactccagcctggcgagagagtgagacttcgaaaaagaaagaaaaagaaagaaagaaagagagagagaaaggaaagaaagaaagagagagagagagaaagaaagagaaagaaagaaagaaagaaagaaagaaagaaagaaagaaagaaagaaagaaagaaagaaagaggacatgtgtactatgagggagagggtcattattcatccccagctattccccagcttcttccttccttgtacctaccagcaaccccctggtcctttgaaaacatataaggcagaatcctcagctgccaccacaaatgacctcggaagggtcagctaacagcaacagtcatacaggttgaacatttttaatttaaaaatctaaaatctgaaatgctccaaaatctgaaactttgtgagtgccaacatgatgccccacgtggaaaattctgcacctgacctcatgacaggtcgcagtcaaaatacaagcacacaacatgcagtctattccgcatcccagctcttctggtgatgctactgtgctgcttagttaccctgagcacattagttttcactgtattcatagtatgtcatattttagtgttaagtacttatgtgtgtaagtgtaagaaaatgattgcttataggggccatataaattcacagtcaggaatgacggtgatgccaaacaaccacagatggcccacatggatggctgagatagtgactcctttgctttctgatagttcaatgtacacaaactttgtttcatgcacaaagttattaagaatattgtataaaattaccaggctatgtgtacaaggtgcatatgaagaataaatgaatttcgtgtttagaattgggtcccagtcccaagatatctcattatatatatgcaaatattcccaaatccagaaatatccaaaatctaaaacacttctggtcccaagcattttggattagagatactcaacctgtagtttactttactgaacgcttatgatagactcagcactgttaagtgctttagatctatcatctcatttaatgctcataacatttctgtgaggcaggttattagtgccaatttatccataagaaggctgaagtttgggaaatttaagctatttggccaaggtcacattgctagcaagtggcagagacaggaatttgttccaggttatgtctccttccagtgtcaaggtacttttcacctgtctgagattttccaaaattaactgcattaaagaattaagaaaaaagtaaaatatagatgtgtagaaaaaaacaagttaacaaaatgcaagtctcttgtgctcttaacatcaaaatctagatgtttagcaattaatgagttcgctaaccaattttcctcatagagcgttataaagaacatatatgtatgtgcactttatatattttaaagcacaatgtgaaagttaaacatagatacatattattttattttatttttagagataggatgtcactctatcacccagactggagtgcaatggtgctatcataactcactgcagcctggaactcttgggctcaagcaatcctcccacctcagcctcctaagtagctgggaccatgggcacacatcaccatgactggccaatttcaaattttttttgtagagatgacgtctccctatgttgcccaggctagtcttttttgggggtgggggcggagggggacagggtctctctctgtcgcccaggctggagtgcagtggtatgatcttggctcactgcaacctctgcttcccggattcaagcgattctcccacctcagcctcaagagtagctgggactacaggcatgcaccacaacaaccagctaattttttgtctttttagtagagatgaggttttgccatgttggccaggctagtctcgaactcctggtctcaagggatccacctgccttggcctcccaaagtgctgggattacaggcgtgagccaccacacccagcctccctatgttgcccaggctggtcttaaacacctggcctcaagtgatcgtcctgcctcagcctcccaaagccctggtattaaaggcatgagccaccacacctggcccatttatatatatataatataatataaaagttattatttattctttctaggaatattccctctctatcccccaaccaaggtctgtgaagatcaaataagatattatggggactaaggatgctcccttagatattttctccaatatatttttaagttaccattttaattttgtacgttcaaagtgaaaatgcatttttttgtaaaacaagagcaataaagctcaggcaaacttcctggctggtggagatctcaggataaggtgtgagcacgaaaaggagacaaatgagacttttgtggttgaaatgaaaaaactctcctccatcctgtactgactctgcagttttctcctgtctcttcaaagtcttaggctccaggcccctggaagtcctgcttcacctatgcctacttctcttgctgccatttggtttgcctgatttattgaggcttccagaaagtgccttttcttagctgctgattctgagctagtatttggcctctttaacacatgggcctttgtgtggacaccatctttccctgaaacctgtctgcatcttttctgtcccttctaaccatccagtttgttcttccccaagatgggctgccacaagttgccatttcctgactggtgcatggttccagacagctcgcgggcagacacagggaaggaatcttatctcgtttttgtttttttgttgttgtttttgtttttttcttttttgttgtggttgttgctgttgttttgaaacggagtctcactctgttgccaaggctggagtgcagtggcgcaatctcggctcactgcaacctccgcctccagggttcaagcaattcactctgcctcagcctcccaagtagctgggattacaggcgcccgccaccacacctggctaatttttgtatttttggggtttcgccatgttggccaggctggtcttgaactcctgacctcaggtgatccacccacctcagcctcccaaagtgctgggattacaagcatgagccaccgcacctagcaggaatcctatctccaacaaacattttcaagttctttaacctgaaatgccatagagaatcattcttgatctctccatgtctaagcaggaatcttatcaacataacttacaaaatcaatgtttctgattcatacaaaacttcccccatcagtactgccataaaaggaagcagagggttgttccctcctcacccaacaaaatcttgcagccccgcatcaaaggcagccctgaagcatcactccactgggaaggccaatgctttcttccatcacgttgcccccttctcaatacaacattgaattttcgagccaaacagattagaattcaaattccaactatcataaagttctgtgaccactaaaccactccaagcctcagttcacttatcctcaaagtggggctgatgatagatagtaactatcttacagttgcggtggggtttgagaggcagaatatatatcaaatctttgcacagagaacatagaagtaggctagtattatttaccaaggtagccactatccctttctgagcaaagcagggttaaaaataaagagaggggccgggtatggtggctcacgcctgtaatcccagcactttggaaggccgaggtgggcggatcatgaggtcaggagttcaagaccatcccagccaacatggtgaaaccctgtctctactaaaaatacaaaaattagctgggcatagtggcgggcacctgtagtcccagctactcgggaggcccaggcaggagaatcgcttgaactcaggaggcagaggttgcagtgagccgagatcgtgccaatgcactccaacctggcaacagagcaagactccgtctcaaataaataaaaaaataaataaataaataaataaataaagacaggtttttctgttcccaaacacttctggaaatgaatcagtcgcaacagtctttcctagaagttaagtcctcccttcttcactccctgtccttgtaacagggtctgaaaacaacagggataaaaagtataggcaaaggacaagaaggcaccatagctctagcaccaaggaaaaggcatcagatgttttggttttaagaaaaaaaatcaccctctcccatactaataatttccaactttatcaagctactaaacaggagccgtacgacccttgctttactttagaaatgggagaatgctagagaaaaataggactcttttaatcattactatttgtattacactttatgcctcccacacagagctttgaggaaagctacaagagctcagggctgttaatgtgacaccagcgatgttgtggtaatcagagaaggccactccaagcttctctgctttcagggatctcacttgccacaggatgggggagggtggggctggaggagggagcctgggcggaagacccagaactccctgaaggtttgatgagcaatctgtgccttcagaacaacagtaaaatgatggaaagctaaagattcctggaaaagagggactagagcaagaattgacaaggcaggcataaaaatgaaaagaaagctagagagtcaaagaaattaagctttgtctccagctcccattgccaggatgaaaggaacttctccgtgccggactccaagaaaagggactcaccctcccagctcagcacaaactcccagggcccaccatgagggctggaaaggaaaggaaacagaggggtcatttccaaccaccaggccttagagaccattgtcacaggaggaaaaagaggcagcagacagagagagaaagtctgggtgggtgttaaattataattatgtctacaatggtatatgaaaaacctcgcaggtctctgctgatacagatatgggaagtccaccttctgaatcccatgctggagttgataagaaggaaggcaaaagcaggaatcaagagctcagtgccttcttttatacagtgcccaccactggtaaggagacctctgactcagtttccagaaaggaaggtaacctcttcagccatgatagtcaaccgactttttaaaaaaggaattttaaattagggaaaattagatttgtgaatgaacatccttctgaaaggaggaaacatgaagcaaattatagttctattaattaattaattaatttaaaaaaaatttttttagatggagtcttgctcagttgcccaggcatggagtgcagtggcacaatctcggctcactgcaacctccgtctcccaggttcaagagattctcctgcctcagcctcgagagtagctgggattacaggcacccaccaccacactctgctaatttttgtatttctagtagatatggagtttcaccacgttggccaggatggtctcaaactcctaacctcaagtgatctgcccgcctcagcctcccaaagtgctgggattacaggcgtgagccaccacacctggccatagttctacatatttatatttttcctccttgcattgggaaactaaagagtaaacaactcccatccccccaaaaatcctaagaatactaaaaagcatttagtcaaggtctaaccatatataagaaagtagttaatatttcccaaatgaccccagaccaaagactgaattctgcattactaataccatgaccttcttatttagtgccatttataggcattcaaagccaaagagaggaagtcagcaatatattaattttcttaattgttatgtaaatgtctcagactgacctgtaaaatgtatgtactcatagaaggtgtaattcactctaagatacaaacttactctctaaaattgcagttggtaagcactcaacatggagttgagaaaatgtttacaaaatgcaagacaggtgtttggatttatttcaaatgtattaataaaaaatacgatactcccttgaatgatgaatacggagtgtatggcagttaattttgggaaaaagaagtgcatgtaatcacttacatttttgaagtgaaggttaatctgcaggaaacgggaagttaagatgtgtaattaacccaaaggtacacaatagaaagaatgggaggcaaagactaaagagggagcttgaaggagctagcacagaaatgcctgcagaaaaggcaaacagctgaaatgtctcttctttaggctttttcactcatttaaccatcacagacaggagctctactcatgggtctgaatgtgcccaaagatggtgttactcaaagcatggtgtctggacttggttctcatcctttaaacggtaatgttccacacccacagggcacagaaatttaaaagtgcatggtgagaggcccacagcaatctgtaattaaaggaacattcgagcacatgatcacttttctagtagtacatttttattgtattttctaaatgtaacagtgagaaatggattggaaatagaaggagaagaaactggtctttcaccataggaagtttgcagagcacctctaaaaaacctaccctctaaaattgcagttggtaagcactcaacatggaggtaagaaaatatatgaaaacttcccgttgttcggtttccactccaacttatgttttcccaatgcagaggcctgcctggttagtatagaaactgatgaaaaaaggcagcaatgatggctatttttgcctgaaacactgattccactaaaaccaacacctggctttatactgttgtgctattccacataaggtaaaatcccactcaatctttttgcttgtttgtatataaaaagaaattctgaattgagcaggcgtctatatagaaaaatggaatccatagttttaattattaaatatagccaaatatttacacatcattaaacacaaaatatatgagctgttaggtgggttcttccccctaacccccatgccttactatgaaggaaaatgttacaatgcatagaccacattgcattctctcacgtctactttactttctgtttgaatatctgtggttatagcaacatcactttttatctgctaaaaatattttaggcttcctctgcctagatttttccctctggaattctgtttataagaggtatgggtataaaaaagaaaataacatgtctttgtcaggagattaaacacattaaaaaaaaaacaaatatacatacacatttgtacatgaacacaaaatgtaaacacacatctacaacctacacccgaagttccacaagcaaaatcctcattaactcactgtcttatcactgagaagaaaaatagtatatccaaggaccataagacaacactctccttatttaccaatatcgtgcttactgaaataaagctttttaggtacttccttggttatattaagcaagttgctttcaagttcaataacataaatgcaaaattcactaaatatgcaggcattggttggctgaagaagagagagcactgggattggctgagctaagggagaaatagatgagggaggaataagtcaacagtgccccaatttgagaaattctgtgagtaaacattgaagtctcattggcatgattttatctaatggctttaatatgtagccgctgctacaaatgctggggtcatctaatggggagggtaggaaacagacctcacactgcacaacaccagaggatgtgaaccgtctaggctgcccgtagatctccataaacaaggcctcttcccatcaaaggccactgtggaatgtagctggagttgtttatgcttctttctttttctattaggtttattttcctgatgttaaaccctgtcaactttactgcccagaaacctatcttcagaataggaccttctgctttgaagactccttttaagaaatgtcaaggggcagtaaacataaaataggatccatagcaccaccaatgacacaaaaacagggccaaagctaatcagtctcctccataaaacacacactcagtcttttctccctctcacacacagtagcagaccaataagatctgcggagtgaatgtaagcaacagagtaggaagcagctgaaaagaaagaattcctgctgcgttctccccttgtgcctctttcacagtcaaagggttcaagggaagaatgttttattgcacactgctgttcaccactagcagtgcaagtttattctgcccaggggctcaagtgggacgaatctggtcatctccatatgttctcatagtgaaattcttctcgttttcctttcatttttcaggcctcgtctaatttaaaacaaaccacacagacacactggccaaagcagcgactgcctctgagaggaaggtgggcctgcagtactggctgggaccacctccacatctgaagatgctgtttgcctgtatttgcttcccagcgtccttcctccctgcctggttgcctgttgggcctaacatggagctctgcccacagtagtgtcgttactatggccactagcccataccaaggcatggcctttgcagtccccagcatacagctcccgacctcacaggcaagtccatctctattgctgtcaggaagtaaaagttcacacggggcgggcacaaagtcctgctcatcccaaggcaccaacgcacccccaccaggctttccccagaaggcaactcaaccactctaggattttttttttttttaaataaactgtattaggagcttgtcagaaatcccgaagttggagaccactgtgaaactcctgggtcccaccggggctgagctcgtaccagtagccctaaattcaaaaagaaccagggaaggttctatttacaagtgaactggactcatgatgctccaccaaggaggcaatccctgaaaacaggcaaggttcatcagcaactctaaccgctcagggtgtgctattactactttttgaaaacaatcgtctgattatacaaacatgtatatagtgcttaacagtttactctgtattctttctatgaatagtttcatgtttacaacaaatctaggagggaaaaggatagaaattattatctccattttatggaaaagaatcgaaggctcagaacctagctagtaagtaaagaaccgcaaataaagctcaggtcttgtctgtctctttccactacattacagctcaccttctgaaagaagcttcatctttgtggcatctgtaaaacatttcccctatctttccccacattgcccactcctcttaggtgctggaagaaaatgcccactacttttacacatataactaatacatggttgctgctctgcaaatgatttctgaataaatgagcactcccatgcatgccattccaatgcacagtcacccttcttgccctgggccagatttagggaggtcaggagcatctaatatggaatcttaagtagtcagaaaaacaggaaggaatacagatggatatgttccttgtttgcacataaatgctatttgggcttctcagacctgacacttgagcctttcctgaaccgtgtgcttttcctaacatgcaggtctgcctgtcaaatttatgacatcatgctaccatccacttttctggcaactccagttattctttagttttacctctcagtctaaccagaaggttcccctaagtttcccctgtattaactaggccaattgatgttttgccaacagcagggtctgggtattttattttgttttagatccacttgccattctctacctctctcccaggcagtttacaagcatttggcccactccactcctcctccaggccttaagttcgccccaacacactgactcctgtaggctacagaaaagcccaacggcaaaagaaacaccctagattgaaacacacacgcgcgcacacacacacacacacacacacacacacacacacagagagagagagagagagagagagagagagagagagagaataatggaactcaccctcctgccagcagagaatggccaaccccatctccccagttctggttatttctagaaatctgaaatctataatatgtcaccatcacttagcactcagtaagtatttattggatgaatgcatgaatgaatgattactattatctgataatatgcacgtgagagaaactttatcaaacgctttctgaaaatctaaattactagacaagcaaagggccgatgactactcagggatttaccctttagtggcagacacaactttacagccaggcctacttgtcttgttacaatcacttaaatattttatttgtttacaaaactcttctcaactatttttgatggtttgttgccacgtgcacaacctaatgtgcacgtatacacagggaatgaaggtatgaaacctggcacactgccaccctaaatatcaggcaggctcctcaaagacaacagtaatgctgtgtatttctttatacattttcactactagatcagccatttgaaggtttatttattcctaaattcttcaacttcctgtatctgagtatttatgtctcagatttccccattacctcctttcccaccactttattcctaatattccacttttcacctcgttactatgaagcacgacctaacgccagcatttatttcctgacctccaaaatgaaacgactcataaacaaaacaaacaaaatggaaaaaattttagcaactatttttgggccccagaaacaaaacttacttttccaaagaaagagaatcctttaacctactttgaggactaacaaatgacttgaacacattgtgttcaaggttttgtcaaacgatgggaaaaatacaaaggtctagtatttaaaatactacctttttttcccctacaatgcatcaccctagtccaatgtaaccttaaaaacatcggggggcggcaggggaggatagctataacggtttacattgggttatagtccttgttgtggctgctgttgctatcatttggtgataatttggaaatgctcccctgaatatcccctctgatgcttctggcatcccagtatctgcccccagaccacagtgaagctgttagcaggatgtgaacagagttcacaaaatcaagggtttgtttacataccagccacagcacgaagaaacaaataaggtctaaatgcctgttgtctcatctgtttttgtgttttccttgcgtatttcttcccaagctcttaacaaacgggtaatgggtagttaaacatttgcgaccagttactcatcttgctttgcagtcatagagctggtctaagtggagcagccagtaacttcaaaggacaccctagtttggatctgtttcccaggggacagagcgcaggccccagggcaccctcataaaacccgaggagggaattactccattccccacccctggttacctgaatcacactgtgcacatgtacagaagctaaaaggttctctactttgcccccatttgactcaggaaaaggaaaacaaatgatagatacctgcactggttcctcccactcgctacgaactccattctctgcgcccttatgcaaacctcttagaagggtcagggcagctgtttccagagctgcttggccaaaacgggcaaacacatgggcatgaaaagaattctgaaaatacttccgattgcttttcttgtctctcacacaagagcatgcttaacccacgggtacctttcaatgttcatgtataataaatacagtttcaaaataaagaataagacacccaaaatcctacctattgggtgtagctgctgccttcattagtcaaattttctcagagaccgtagctccagttgcactgaaaaccgtcgttttttaattattttatatctgtggccatttgtcctacagatttcttcttggcctctatcatttttgccagtggaaaatttatgctttcccctttaactactactggtctaaatttactttagtgaagaaaattttggctctaactaaaactcatgtaaactttccatttcaccgtgatgttttcttttcttggattcagcacaagtcttttctaatctaagaaatggctcttacaggccctcctcaaatgtttgttttccaatttaagaggatctctctgtacatatacataaaacattaaaagcttcagtgatgtgtccaaagttgctctaaggcgggaatagctgatctgaccctccaccatccgcacataggcgctacctcacaaatgtgtctgggtaagaccctgccccatcagcgtcccctgaaacttctcttccttgaatctcactttgataagcacacatgcttggactcaaacaggtcatctccagtatccatttctttcattttcttttgtcccacaatagagttaaacaatacactgtctcgtcgtccaaatgcttcaagtggttttacatgctttattccaacgatcttctcagtatcaatgtgagaacagagaggatgaagaaatttcaatcattctttaagggaaaaaaaaaggcatttaaaatatcaattattttgcgatcagctcaagatcttacaggtatggcagaatcagaactaaagtaccagtgttcagaccctcacgaatatggtgaattcatcctcctactctctctcataatatagagtaaacctaaatgtaaactgaaccacttaaaggtggggtggggtgaacgagagaagaggggaaggggaccatgaacattaaaccatttcactagaaattttctttgtttctaacctgtcgtaggagtagagaaaaaaaagagagattttaaaaagaaattttctttcttttaagctatgtccctattgctcactttgaaaaaagaatgaaaataggccgggcacggtggctcacgcctgtaatcccagcactttgggagggtgaggtgggtggatcacctgagatcaggagttcgagaccggcatggccaacatggcgaaaccccgtctctactaaaaatacaaaacttagccgggcatagtggtgcgtgcctgtaaccccagatactagggcggctgaggcaggaggatcgcttgaacctgggaggtggaggttgcagtgagctgagatcgtgccattgcattccagcttgggcaagagtaagactccatctcaaaaaagaaaatacaaaacattctcctaccaatccttactcagaattgaaattttctattttttgtgtgactcttttactagtgatgttctcttttactagtaatcagagggtccatgctatcttatatatcctctcaatgaatatgacttcatatactcatccctgccatagcatcccattctaaagacatttttgtcttacgaagcaatatttgccttgacattctgttatttgggaatttgcactgtttcagtttcactggaaataatgctaccatgagaaactttattcttcacaatgatttggaatttcctgtggtttctacgctacgaacaataaagttttacctctttttaattattgtgaaattctttcctggatatattgtacccatttacagaaacatcaccaaagtgtaagtgaagatgtttttccacattttaatcaacgctgggtttaaaactcacatttatttttttaaagtgtcttaggcatataacttcactttaaagttgtcttaatatatgttctttcagctcctaatgagggtgtgtacttttcagggtgataatttatcatctatatttcatcctgggtctccttcactactcacactgcctctttttaagcactgaatcatgtcataggtggaggaaggggccaaaaataattgtttaatcataactatacaaccaactctttacgatgaaaaacagaattctctacttcaggaaaatgagattatatttagccttctgaaaatgagtaacaatcaagcataaatacttgttaacaggttcacacataagcacatgaaaacaaaattggccaagctgaggcaggaggattgtttgagaccaggagctcgagatcagcttgggcgacatcgcaagacctcaactccaaaaaaaatttaaaaaattagccgggcatagcggtgcacacctgtagtcccagctacacagggaggatcatttgagcccaggagttcgaggttatggtgagctacgatctcaccactgcactccagcctgggcaaaaaagtgtgatgggagggaggaagggagggaggacgggagggagggaaagaaagaaaagtaaggaagaaaggaagggaggaaggaaaatttacctggtctaagagggagaaccctttccctcctctctcccctatccccttctttcagacaaaccccaatttctccatcatgacagggctgtccaaaaagtcatcaagatgtagtcttatcctttgaatgattctccttcttatctcaacagttatctctatgtccaaaacacctcttcctttccattcccactgctccacggtttgggccttcctcatttctgcccagactagcaaactcatgttccagcttctagtctttgtcctattctacgtggtactaacagaggaacttcctatagtacagctctgaccttgtttctgcagtgtacaaaattctgaggtgctttatgcactgacaaaccatatcccaactggctctcaccaagaaaacgcattgccaggagctcttcactggtatctcctttggtatttaaaagcttcttaaggaatgtgagtgtgcttatcatagtgcttagcaagactctaagagtactcaaaagaactaatttagagttttctgtgtactatttcacaatacccagtcatcagatgtaagctgagtaaaatcagtatcttaattgtatctcccacagttcggtgctttcagtgtggaatttctacaaatcatcattgaacaaatgaactacggaaccaattgctctttattgaatccactggttgagtgctctagaataagccacctagaaacatattggtatttaaaacatcaatgacaaggaagatactaatactcaaaatactcccacaaatttgtttttgaaaagaaattattgtaaacacaaaataaatgacaggccttcaggtgaagctctattatcatatcatacctatgactgacaccagcaaagatatggatgtgcctcaggaagaaatgtgttaccaagacactaatccatatactttctaaagaaattgcatgtcctaaaaatataatccttccaaaattgttattataagtaaggcaaggcttagtttgcttgatcagattttgaccaataataataagaaaaagaatggaaacccccccttgacaatcagttacacattctccttaatcccagcatgatgtaacagacactgtctaaactcatagttggaattccaagttcatgttctttctttcattagtttcatgaccttgggcaagtcacttcaccctaggatgtctctgtttcttcacctgggaaatgagaatgtttggctctgatctttcagatttcatctagctccagaattcaatgatttatgagtatttaaaataagctttttactgatatatataacagcatgaatgaatctcaaatgcacaatgctaagtgaagaagccagattcgaaaggctacctattctatgatgatattcacatgacattccagaaaaaacagaaccatagggatggagagcagatcagtggttactggggattggaggtacaggggattgtttgactacaaaggggtagcacgaggaaatgttctttgagggtggggtaagagaactgttccacatcttgattgtggcagtggtcttgaactcctggcctcaagccatcctgctgccttggcctcccaaagtgctgggattccagacatgagccaccgcaccctaccctatgtggtagcggttaatccaggcatttgccaaaattcacagaaaggtacaccaaaaagagtacattttactggatgtgaattaaaatgatttaaggtattagaaaatttatttttccaaatccaatgcatctttgatgacataatagctggacaatatcccccaagaaattaacaccaaacttctggatttactgtcgccattttaagactgatgaacaggtttacacccaaataatttgcggtgtgtttttacggtggtggtggtgttaatctttcaatggacattctacagagtgcttctgtgtagctctgttttccagtgtggaatatccaacaatgaaacagcgaaatgaactctagcggaaatgattctagggctgcccaggacctgtgtggccttcatggaatgttagaatgttgttgttatctttgtgattcaaactaaagatatgaggcacacaacaggaatgacaataacaacacagcaataatagcaacagctaacatttaatcagcacttagtaagttccaggcactgttctaagtgcttacctacagctgaagtgctacagtagctcatttagttctcagaacaatcctgtactgggttatactgctatctcatttgacagttgagaagatcaaacaatgttctcaaggtcaactggcccgtgggtggcggagtcagaatgcaaacctagacagtctaactcttaccacaaagctaaagctgcctagaaaagcttcattgaaagaataacttattcatcttcgtggagagtctgtggctactactacatgcttccacaaattcttatctaggctttcttcagaaattggacaggccaggcatggtggctcaggcctataatcccagcactttgggaggctgacgctggcagataacttaaggttgcaagtttgagaccagcctggcaaacatggtgaaacaccgtctctacttaaatacaaaaattagccaggcatggtggcaagtgcgtgtaatttcggctacttggaaggctgaggcaggagaatcacttgaatccaggaggcggaggttgcagtaagccaaggttgcgccactgcactccaacctgggcaacagagcgagattctgtctcaaaaccaaaaccaaaacaacaacaacaaacaacaaaaagacagagaaagaaattggacagagggctttttctaattaggaaaagccagcatctccatctctgcctggtaatttcatgaagtctgcatagcaaaaagccctacatacactattttacacaatcaggtacaactgctttttcctattccattctccttgctcgcagcaaagctggctttagctgacaggcaagatttttttcctaaagccttccaagataagccaagagaggggctgagcttctcctacctgccaccagttagggtctaccttttctttaaatcattttcactattttatgtaggtttaagcctctgggtagaaatctgtcccaaagcagacaagttcctgttcctgaaatgactaattccttgcacaaggcaagaggctggttagaaccctttcaactagagggaatgattagtgtaaaacaaaacaaaacaacaaaacaaaaacaaaacaaaaaaaaaaaacaggaccaaggaccaagctgctgaggctgaaggaaaccacataaacaaaaacaatacacccattagatagtacttgtaaggtattcagaccctgagaaattagtttgaatgcagtagaaaggcagattacaggagagaaagggctcccaactagttcaagggtttgtttagtctacttatcaagcccaaactaatcatcttaatggctgtttatgcccagaacagggttcaaatggcctttcgaagaaagcagggcagacccaggctagcaaccttcctctcttcgaggactgcaaccttcttctctccaaggaccccaggattctccttactaaggatccccactctgagcaggtaaaacagcaggccatagttttatttatttcctatctatttatttcctatcttcaaacgagactatacactccaaaaagcagtggggtatcatctctgttgtccattgctctatctagcttatagatcatttttgagataaaaactttatatatatatacgtatatatatacgtatatatatatatacgtatatatatatatacgtatatatatataatatcagagggttaatgaactgtctggagggaaagatgggaactcagacttaatttaactccttgcttttccccgatgcagacaccgaaaccttgcgactgagcatcaacaggtgccttcctcctgcaaggaaactttcagaaaatcttcaaggtaaaccaactatcattctaccagaatcaaggacaccggtttccaaaattctaatccaaaagggggagtgggactgggggaagatcatcaacaaggcaatccttcacctactcctactcctcaaagcagcatcagatgagaagccgggtgaggcatgttaaccgagaagccctcctccaattaatgtgctattgctcctttaaaaccgagaacaaacggcgcggccgctcctgatcccggaggctgcagagcagtaattgtcacttagccacttaactccccgccgcactgctcactcactcatcgtggtttatctctcagccaattactgctgtcatttgcgtttcaatgtgtgccatcaggggccaggcccagtcgacagcagaacagaaaacaccgggaggagagccgactggcttccagaggcgggtggagcccacacctcattccctgctgctctgtgggagcttggaaggtattctcctatcgcagaggctcccaaaacagctccagaagggacccaaaactacctgaccacactccagttttgtgctgtgcctggctgtacactgaggcaaccaaaaagaaaaatttgagccctaagtaccaagtcaataataaggatggtgatattaaagcaacagaaactttagcagcttagtgtgacagcagacaagagacaagtagaggaagtggcaaggattcctgcactgtattattgtgaaatccacccagggctagcctacaaatgtgaagacaggaaaactttataggtctcgctgctcttttatgcgagcagatttccaggcacgatgttgttcacccatctataacttggccccaaagtgtgaggaacatatgaattttcttaggcggtcctgagttgaaatatctaaaaattatatttgcattctattgccatattatagactggtgatacattctatacttggtaacacaatttcatttttaaaaaaatttcttcaaggcacaaccagatgtgactttttataactaaatcagaaaaaaagcttgccagaccatgtgtccagatttttcagttctgcaaagatatcctttctggttgctcagtggatcctaaccacaaaagctaagactcatgtttgtttgttttttttttttttttttgagacagagtctcgctctgtcgcccaggctggagtgcagtggcactatctcggctcactgcaatctctgccttccgggttcatgccattctcctgcctcagcctcccaagtagctgggactacaggcacccgccaccacgccctgctaattttttttaattttttttttatttttagtagagatggggtttcaccgtgttagccaggatggtctcgatctcctgatctcgtgatccgcccgtctcggccgcccaaagtgctgggattacaggcgtgagccaccgtgcccagccaagactcatgtctttaaatagtttgtttactctgccttcctggatcaaatctataccatcatgtgctgcattagggcttttctcccagaaggttgaaacctcccatgattgtagaggcagcaccttggctgtattaccctagcctgagatttcctttggagtgcattcggtctggccgtcaggttgtcctgctcactgtgcagcatgatccccctgacattccatcctttggagccccagtaaccacagcaggagggccagcagctgaggctgagccagaagagacctgttctagctggatctgcacagcctggtctctgggtctaaaataaaactcttaacttctctgccaatgagctctgccaggcctgatgacgtaacaggtcccttcagttctatttgcaggcaaggtccatttacatcaggatttcatccaggtaagggggaatttgggagggggagggagtgagggactctcagagaatggacctgtcttcccatcatgcatggaaaaggtctgaaagagctggtgaggtgccaaagtaattgtacacgtcatcttgagctgtgcaaagaggagcaggcctagctatagctaattgctatcctccggctatatgctccccactgaataccagagaggggaatctgttcggtgcataacaaagaaaaatcacaagtaaaataaagctaagcagcagccggccaacgctgtgatgctgcgaccgccaaccatggccagccacacacagggaaactcggatttgtcctcactcatcttctctcaggccttctaattaagaaaaccttaaacttggaaccaatttactcctttctcgctcatttaagtcatcaccctgacccatctctgatgaagacagagcacttcaaacaatggagagtagttcctaagatagccggtggccaacgtgaacttcctaattaaggacccacacaaaagtaactttctcttcttctgggctctttgtgtttgtaaaaatgcggcttcaagctgaacaaactatttgatcatcttcccgcttccttcctcctttcctgtctgtctgtctgtaatgtttctcagctgatcaatagctgtctctctgtgtcatgaagtgtgcaataagctgttctttttcttttgtctcaaagccagaagacgctgtatggaaagaccagttcctcttctcccacccttctagctgtgcgtggcagcccagtggaggtctggacgcttgccactgagtgccaagagcaaaacccaggccaatcagcaggacggatccaagcccctgactgcagcagaggtgcctctccgcagccaggctgcagccacccacagccttggggctgccctgaccctgcctcaggcaggagccccgcctccttctcaaaggacgtcacagagtacctgcccttggggtgccacacatctttctttgctctcttttttcagattcaatttgcctgaataggaagaacctctccttcctgcctaatctattcccagaaatcccagctgctctccccaactttcacagagcaaatcagtaggcccaccactgtccatgttggagatcacactgagcctcgtctggaccccccactgcttctggagcatctccacagacggtcaaatctgcatatccaaacctgaatccttcatctttctctcccacttgacccccaattggcaacaacaccctgcgctccaggctgagggtcaggcttaactgtcccctctcctcatctcctacatcctctgcaagctttctaaattttatttcacacacatttctcaaatccagcccccagaatctagagataagaccacagccctagttcaagcccaaatccatcctcctcactgcccttcttgccccctcttctttccaggggccgcctaacacagaattctaactccattgccctgtgtccctctgccctaccctccgagccccccaataacatctgagaacccatgttcctctccactgtcacccactcaatccttgcagcagggacctgcactggttcctaccccgccacaggaagcttcctgcttcctgttcaggctccaccctctccagagaaaggcccctcctccccttcacccagctaataactctgactttgttcacggactccccacctccagactgggctaagtgcttcatacacatttctgtcattggatcaagctcctaaagggcagggactgggtaatatttccctgtgtagtctcagcacccagttacacactgtgggctcctgttacacacagcaggttctcagcaattgggatattgcatttgtactttcagattactagctgatgctctctattacctaccacagggcaatcaatacctaagtatgccttagacccattctggtgctacctatttaaagaaggcagactcctagacaccaacggttgtgtctatggaacatattttgtctagcaacttacgcactttggggtacttaataacttgatggagttgaagatgatgacggtgacaatgacgtcaaccaggacaggaaactggagatgattagacatcctttattctccaaggctgtgtagctgcttaaaacagttctcgatgagtcacagaatgacagctcatttatcttgaaaccttaactaaccagaatacagcatggaccctcagtcagacacacttctgagaagctgaaatacgtatccgaaagttcacatgcttgtccacacacaagttaaagaggtaacttgtggaaggggtcatctagtctgcattcagggcctatttattcttgcttaacattcaccttgataatctatgcgatctcattcctcagtcacagcaagttatttgatgtaaaatatgagaagaggcgaggtggcaagaggctgctggggactgacacgtgggagcagtgcagaagagaaccctgacaaaccttaaaagaacacaaagtacatagtagtcttgggatggctcatgttgagggacaatgagttccacacatattaacaaaccctaatgacaccatcacacaaaggtacaatatttaccctcacgatgatgagcaagataccgagagagttacattctgtgcaatattttctacctgcagagaaaaggaagttgagagaatattttaagatgatttctatcaaggtgattttttttaaggagttttagcatttactgaagtagattgcatttatctggaaattttgctgctgagatacctgacaaatgagccattgcttaacttcatccagcatggaactattaagtagccacggcacaggccttgcccaccaagagtgcacagcctaaaacagcccaataccctggagaatacatttgtatatttagttttattttaaaacacagtgaaacaggaaacactatctgccagaaaactaccaaatatagaatgtcccacacctccccatccatgcaaaacacaaacggactaagatttcaattcagggcaagagcataagagatgagtctatttcaaggcaggttccacttgggaaatgataatcttcttttggtcttgataacccactctcctcagtctctctctcctttcctctctccctccacctttcaccacctcatctcagctccttcagtgtacaggagctgcttagaaggagaagacgaagccgaggttttgttcgagttgttacagtcccatggtcatttccgtagtgggtcagcaagtacaaccaaagtaaatccaaagaagggaaggatgagagctacctggttatttttcaaaaagatggggctttgaaatgggatttaaaaaaaagttgggaagtattaaagggaaaatcttcctgaaaccggatactgaagaaggaatgtactgaaggaagacggggtgaagagtggccagaaaaaaaaaaaggttaattttataaataataccaaagagttaagtggacagaatgatgggaaagaagctaaagtttggccacttatctgaccatacctgcaaaactggaaatttcacaacctcatctccaagctcacgttccttcgtggtgacaagagggaagtgaagacttttaaccagatgggaaaagttaccacaatatttccaatactgtgtttccaccaaatatttccaaactggcataggatagagggcatgaaccagctatcactgactggcttggcatttttgtcaacctgcctgtattaagaaacctgtcttgaaaagagcatttttattaaaagctaaaagccttcaagtcctccacgtttttctccactacgaagtattagaatagagagaataagctatcgttcatttattcaacatttactgaacacctattaattatgtgctcggtccagggagttcttaagagttctcacattttcaaaaactgggagaacttctattttgcatatgtgaagtgtgtttatttatacccaaacaatattgtgataaagaacatttgtagttcactcaaaatattcgcagtatgctcaaaagggcaaaggttttttgaatccgagctctattacatacaatgcgcacgtccttgggcaaattatttctctagaccttgttttcttcatctgtgtaatggggaactaggtttcatcattttttatgaagattaagtgaaatatcagctggcaagcacttaacagaagctggcacatggcattcaagcaatcatgcatttagtaaatatttattgagcacctcgtatacgccaggctgtgttgtaaacacagagcctcaccaaccaaagggagaagccagattccccctttcttatccttcccgtatcatcaccaggacttctcaggggctctgaaagcctgtgaaaatgaaaccaactggacgcagtaccaatgccaaacaccattattttcaatatctcatggtgctctgcaccaaggattgaattttcaagtgagattcacgctgcccatgagtcctgggcacaaaggccatgtggctactggtctgcatcgggctattcacctggggacccaaaagcagagccctggagccacccacaccctggcctccagggtttagacagaaatagaacttaagagacataggttgctgtctctcttgcctttttgctcttaaaatgagaaaggtgacttattttgaggtgggggagggataccctctattcagaggaagttcccacatgaactgctacattgtttctctgactcatttttacttttcctccccattgcttcccagccctcccttgatgtctcggtctgttccagatgtggtacaataggctctttgtttacaagattgtaatgtgcaataaaatcagttatgaggccaagaataatttatgcacaaaaaaataaggacagtaaaattgacatgaattgtatgttttacagtactttttgatctgttacattcctgttgatagaattgatagacactagctaaaaacttttaagtgttcataaaactctgttcacattggaagtatatcacacacacacacacacacacacacacacacgtgcacacaaacaactcaggagcaaaacttttttaaaagccttaagcaaaatactgagttcttaattttgttactgacacaagcatccacccagtctcacaagtaagaaatctgtagctattttcttttttttctttctttctgtctttgtttttagagacagggtctcactctgccacccagactggaatacagtggcaccatcatagctcactgcagtctcgaactcctgggttccagcaatcctcccgcctggagttattttcagtgggtaaggcaaggtttcatgggaaatcatagacagtttgtagccaaacatgcttggctctgaatctcaatcctattcacttctagctaggaggtttttaaacatctcaaagcctcagttactgcatatgaaaaatggattttggtgaaaattaaattagataaaggatgagcagaatgtctgaacacatgtttggcaatcagaaagttatttctccaacctcccttccccaacacacctctcaaaacctttcttttccattctatcactcagtttcatctctcctggactactgctctccgacagggttttcagccttttgtctactactccttcaaaccatcccaaacctgctattacaaacaacattcaaaaatcagaaatttgatcatggcactccctgtcacaaatcctcctatggtgataacattcagaacaaatctgcattcagagaaagtccacgtgtccccaacccatctgttcagcctcaactcccccatgaccaccccacccctgccccttgaacgaccgcagcccccacgttccaggcacccagtcattgtgagtggagcatgccatctgctctggtgcatggactctcactgccactcctccgggatgccagccccactccaccccctcccatctgtagagatcactgtctccttcaaggcttagccccagtgccacttcctctctgcaacgttcccggatttcctctgctgactcaagcctccactcatgtgtctatgcctttctcaagtttattatttaaacttttgttctccagttatccatatctatgagggtccacccccctagactcagttcctccatgacagagaccaaattgtattcatttttacaaacagtcctcaagttttatccttccttgcaagaagaaaataaaaccaaacagataatttattgaactgaaaggacagaatgaggatagaagtaactaaacaatgcccctgtgaatagaggcatttcttagtggaaaaacatatatatgtgtgtgtatgtttgtataatgtaaaaacggagcaagccattcccaaagtgcttcaaattctggcaaaactaagatgcacttaaaatgaagtcttaggtgtattaaaaaaaaaaaagatttcaaaaacctcagcaaaccacagaggtatacaccatatgtggtagattaaaaatgaccacaaattctttgatccttcttccatggacagatgtgtctattccacaacctgcgtccaccacttttaaaggtgagttgcctataactgcttggaccaatcaagtatgggagtgattttgaatatgggagtgatattatgccatttccaaacctagtgcttaatatgactaacagttttggccttggtctcttggaaccctgggcttccctgtaagaaatatgagtaccctaatggagaaaccacatggaatggctccaaggctccatggagaggcagacaggcccagtggggagctcagtcttccaggcatccttgccaaggtgccaggaaggtgagtgaagccatattggatcctccagatcagagcagccattgactgactaacagcaagggaccagagtcgacgctacatggaatagaagaatcactcagctgagccctgcttgaacaaaatcacagatataatcaaataatggttgtttaagccgtcaagttttggtgtggtttgctagttagcaataggtaacaggaacacaattttaatcccttttggcccagcgtcctaccctacctaatagaacacttttcctctaaagggaggaaagtggccttgtgtagaatagagctcccaagtcactgatggtctagttgaagggatgagaaactcaccaggctcttggacagttgcagttgtaatgcacttgtgtaatgtataatacacatttctttcagataagttcagtttacccacagctgttctatctgtcaacagatattggggcaaatgtggttaataacttcaggaacaatttggtagaattctactcaggaagccaggagaccctccatttcagtcttttaccatccacatctcttgtgtatatgaggaagaaatgtttgtgtcttcatttgcctagctatcacatgaagagaagcatacgtgatacctcttagatcagtgtaaattagaaatgaaatcaggttatggactgaaaacaccttcagttccttggccaaaaaaaggctaggtaaactcaaggtactatcatcattttgcaaatatgttattccactatataaaatagcctaaattagtaaatgcaattccacgtgctgggtcagctgagcattttttttttttttttacatttgccagattccccttgttttgtctttctagccaatagaacaacactaaaatatatggagaatttaactaacttttgaaaaagagataacacaagttagaaccagaagaagtcatctgtgccataagtttgtgtcttctaagagccatcagccaggcaaaatgaagtgggaaacttgaaacttaacatgtataaatgatttgtgttgttttgttttaatgctaagtactcagcaaaaagctgagttattagaaaatggacactagcctgtgcttgtgggcataaattctccatctatgagaaggcatgaattgaggcactatattgattacattatgttgtttattctcatataactctctattgtagaaacgatttctagccccatcttcaagatgggaaatggaatcctagagagacttcatttttctcctatatttgtatttagcaattgctattgctgccgtaagaaaataacacagggtggcttgaacaacagaaatttattttctcacagttctggaggctggaagtccaagatcaaggtgccaagcaaggctggtttctcctgaggcctctatccttggcttgcagatggccgcctcctatctgtgtcctcacatgtggccttttctctgtgcatgcttatgcctgatgtctcttccccttcttaaaatgacaccagttatactggattagggccccacccttatgacctcatttaaccttaattatctccttcaaggcccgccctccaaatacagtcacattgaggattagggtttcagcctatgaattttgcaggcacatgagtcagtccctaagaactctacaaatcaccaagccagtcagtgcagagccagggtagacaccctggctccctgccattatctgtggtccccctgattactatccgtggtacttcaccatcccatcactgcctcagtctatgtccagagaaaatggccttgtgtaaaattactcatcaccaccaagtgaagagaatgaaggccacagtaggaagtaaaggaaagaagggaagctgaagctataggaagacaaatgtaaaatccagaaaaactgacacttagcaaggcagaaagtgcagctcacacccaaacctattctgtggccaaagactcccctcaccgtccccataatttgggctttgttgtaactgcaagaaactccccgacgccactctcaatggtgaggaaggaccactgcttgctctgctactagaagtcattggcagggcacaactcaatcacatgctttttgcaaaattacaagataatatacaatttaattttttcatcagatttttgcaaccaaaaaatttcaaagaccttggagtgctatatagctaataaatgcaattaataaagattttgtgatcagctaaaacaggttaaatcccaaaaagcaagacatggtttttctccctctttcagataatgcagggaagcatcacatatttataaagcacaagctttcaactatattggattttccttttaaaaagaacaataatttaaagtggcttctagcagagaaatgttaggtacatttaaatgggtatttgtgttctgaaaatcctaattggaactcttctattgttgttgtttatgtgtgtgtttgttgtgcttctgagaaagggctgaggttcttttgtgcattagaaagcctttcatctaaaattccagtttcatacaaaattaaaccggcatattggagatacaactttacagaaagcatgaagacaaactgaagtattgtttttaaaagacaggaaaaatcaaaatggtttttctatgtgaatcattctacaacaaatatgagacacagcaggatggatgtatcttggaccaagatgacatccgtgttgcccatgacctgctgcttattacgtcagcttcctgggcactgcaagctggtgaagccttaccagctaagcctaagacactgctaatgaggtaaaaatgctgcatcaccttcagttgtgttggctactagcatattaagatcaaaactgcattcttagcttcaccaaagcagagaccaaattttggtttacaaaccaccccatcctattgttcaggaaatgactcaaacaagggtatttctccactattctctcagtaaagatacagtacgtgcactgttgtacacatcatatcactcacttctgtttttaatagagatgatcatctggtattaaaaataaataataagaacaaatgtagtggctcatgcctgtaatccagcactttgggaggccaaggtgggaggatcacttgagcccaggagttcaagaacagcctgggcaacaaatagaaaccctatgtctacaaaaaatttaaaaaattagccaggcatggtggcacatacctatggtcccaatatgcaggaggctgaggcaggaggattgccttagctcaggaggtcaaggctgcagtgagccctgtctcaaaaaaaaaaccaaacctattttatatatatatataatatatatatattatatattatataatatataatataatatataatatacacgaatgtgtatatacatatataaatgtatgtgtgtgtatatatataattttttttttttttttgagagaaggtcttgctctgtggctcaggctggagtatactggcccaatctcagttcattgcaacctccacctcctgggctcaacctccacttcctgggctcaagtgatcctcttacctcagcctcacgagaagctggtattacaggcacgcaacatcatgcccagttaatttttgtgttttttgtggagatgaggtttcgccatgttgcccaggctggtctcaaactcctgagctcaagcgatcacccgcctcggccttccaaagtgctgggattacagacatgagtcactgcatctggccataatatatacattttttaagtaccttaaataaaagaataaaggcatcattataaaactttaattttttttaaaccaaaccaaagggatttaaagttacatatttttaatgtgtattttaatagactgttagtggcactgtccttcatctgagatattaattcaaggccttttcagcttttctccctaaactttctgagtgggcacagaggatccagagtgtttatgtaagcagtaaaagaaagtcctggtatttccaccagaatcccctgcttaacagaaatatgtcccagcatccttatcctgaaactccctgacttagctgccacaaaaagaccctccatgttcctcaaagccaccacccccatcatgtaactcaggcctgagaaaattgtgtcctatcaaagagaagatgttgtgcaaaataaagtccttttgtgctagtgcacattcttggataaaacatcttatttgtaactggagaaaagacatttttaaatggtgatcaaaacaatcatgataccagatttacccagcggtgaatccagaggtttcatgagcaactcgactatcctggtcttagccagacacttcattttaagttctcatcaagtctcctgctcctgtgctacttttttagagctaaactaagcccaggtaagtatcaaggattcccacagaccttcttagtaccttatggaataaatagtaggaattaaacatgaaaaaacccaaagggtcagcccatcctctgtctgacaaaacaggattattctctacagggcattttcaagttagatcgcactcatttttcttgtttacaaagcctcgtattgataaagtataacaaacagctgcctgtttaaatagtttcactgagaaattaataagtgagcatgtaactctgggaagttgcctgtgggggacatggaggaaaaaaacaaaatcctcttccccagtctggtcaatacacccatcacacatcaatcaagtgatggagacactggcctggcccaggataaggatgctggattcctgggatcctggtgtgcaaatcacctgatgaaataactaggagaaaacatttctatccttaaaaaaattatagctgaatgcgaggtggctatagctttccaaattcaaaagatgtgaaatgagccagcctggtttttctacctcaatgactcctaatcccacgtttaggactcctcactaataattccatcactctgcattatgctatacactaggggcagtcatcccaaaacgaaggaatcactcgtcgtctttacttcaggaaatttcttggtaaaactgacttcaagaaaaaaaaaaaaaaaaaaaaaaagagcccctcctgaggcatctaaaacaatctggggagaggaggctcaaattaattttccatttcctgtttttccaaaaatctttctctttgattagacattccctgcttggaagcaagggtagattgactaatccttctaattagccctggttgtcacagaaatactcttttccttctaattgctctcaactatcataagcccccattctggtcaatggatttataactctcccaagtaaatttccttacatgatacacatggtaaactgctatatgctcctagtcttagaagcaccaatccaacagaagcatgcatttgtgtgtgggcatgtgtgtgcacacccacggagaagtgaccatgaaagtcatgaagaatcttccttatgcaactgtgaccttaactctgctttcttatttaaaaaaatcagtatttccaaatacctctaaagtactaggatttaaaattgtataggaattcattgcagcatggagactgctacacaccaatactcaatttcatcacttttaatggctttaatgtttaccttttttcttaatcattggtgttgcaactacccagactatttgtaaagcactggcaaccaatcacagcttgaaagcaattcactgattttcttttctagtctaaaatatgaaggcttagcaaaatcctgagattaattctggagtaaaacctgttaataaacaagttaggtttaagaagagtggtggtgtttgtttgtttttttgagatggagtttcgctcttgtcgcccaggcttgagtgcaatggcatgatctcggctcactgcaacctctgcctcctgggttcaagcgattctccagcctcagtctcctgagtagctgggattacaggcacctgctaccatgcccagctactttttgaatttttagtagagacagggtttcaccatgttagtcaggctggtctctaactcctgacctcaggtgatctgcccacctcagcctcccaaagtgctgggattacaggcatgagccactgcgcccagccaaagagtggtatttttatagaaacaagaaaataaaaaagcagataatttataaacattactgaatggaggaccaatctccttaatgtatataaactatataaactacacaatgaaaatatattggtcagcggttaacacagagattaaatctgagtctagttttcaatcagttacttggggcttacatcaccattgagtcctttgactgtataaaccttcctcattttaatgatttagattatttgtctagcactgatgggttaccagtctcttcacctgttctgtctgatatgtcctcttatttagggtctcacagactatagatgaaaaaaatgctttttttttttttttgagacagactctcgctctgtcacccaggctggaatgcagtggcgcgatctcggctcactgcaacctccgcctctcgagttcaagcgattctcctgcctcaccctcctgagtagctgggattacaggcgcccaccaccacacatggctaatttttgtatttttagtagagatcgggtttctccatgttggccaggctggtcttgaactcctgacctcagatgacccaccagtctcaccctcccaaagtgctgggattaccggcatgagccaccatgcccgaccaaaaaaatgcttctttaggtagaaaagacccctcagccagagtgattaaaaaaaaaatgacggtggggtgagcaaatacatatgctgagaaaaggcaccgagaggaacaaaaaagaaatgggggaagaaaaaaacaaaacaaaacaaaatctacagggaactaccatgcaaattaacaacctctagcctgtaaagacttaaaaggaaataaccacaaccatcatctttgaatccccaatcacatatatgacaaaagacatattgggcttgtcctgcaaactctagaggatcactttatatacctttccccatcctctatccctcccaacccaccatgtatgcacatgtgcaaacatacacatgtgggccacggcctcattgttctatgtctctactcatgctgcccctcagcctgaaatgccctttcctcttcatctaccttcaaattatccttttaataacctgctctaccacgggctactcttgggagcaggctgtcccctgcttcgtgctccccagtacatgtctattatggcacttaagctgcactgtcgtcatttaatgcttccctgagtctccaacaaaactgtgagctccctgatggcaaggctggtctgtacatttcttgaaaccacagatcaaagaaaaactacaaagagtctgaagtcaggcataccacatttgaatcttggttttgtcaaggatcttatctgcgaaatgataatggtatatctacttttcaagattattgtggagattaaaagatttaatgacctagcacatactagatgctcaacaaatgttagattctacttccttctgattaccagggccaagcaaaattcccagcatttagtgtatgttcaatccatgtgtggtggattaaactgaatctctcatactctgatcagttatatcccatgggatataagagtaatcttttcacctactcttgttaagttaaatttgaatactgaagaatatgccaaagaagataacttaagtgaaatgtcagaagctggggccacactgcctgactcaggggccctaccaggaaacaaccactgcctcatctgctgtgcctggctctccaaggaacacactgcccagcccaggattacttctttttaaacttcctggtccctcttttttctcaagtatagcatagatatagaaacatattttccttcttatttacaagactgcatggctaaatgagaactataaagctagtttcaacttgttgagacaaagcaccacacactcacacatacaagttacacttattgtctcaacatttgaaggtttcagttgaaggcatttatcaatgtttaaaagagaagagactaagaaaagagagaagaaaaaaagaggaaaggggaggtgtgataactatgcttgacaaaaaggaacccctccacagttgaaggtatcctcctacattcaagtagatgtagtccagtatgcataacagactacaactctatactctatgcagtagttacagtgccctattggaatttcatgataatgatttcttatacttctcactagcaaaaattcaggggtgctctctggaaaaaggaggactgaaacctctttcagagtgcagaactagttccctagcccccaagcaaagcttctagaccacacggtgtctccttgcctcctctgaagctactgcattaacacagtagatcaagggggaagcagaaaggcatcgtgttaaccatgtgtatgcagacagccacgcaacacccagaaacgatttcttcttttaatagtccactttcatcttattaataaaaagtaactcctacttcttcagaatctcctagagcttataacagaaagctttccttcaactaggcttgcttttctccagctgatcctataaacactgctggcaattttttccccaatgcctctaacatattttcacttagcaccagtttgatgtataagatctgacagcccggcagttataggccacctgcatcactgtcgccatgacaacagtgaaagacaatccatgatcccatgccctggtcacacgtttcaatacagcttatctgtccaaagccactgagtctaatggaagagagtaattaccatcttccactcattgtcaaaattcccaccatataatgctcttcaaaattattttattcctctcacatggctgctttgcaaaaactaaaaggaatcttaagtggaaaacggggtgggtgggagaaagaggaggctgtgactggtataagtggagccgcctgtgcgtgaactgtccctttgcagccaacgaatgcaccagccagcaagaaggatacatgaacaactctagttcagcgatgatcatctcaagattttttaaaatttgagtaaggaaatcagacggtaaaatgtcctagtttttggcctattctaaaggcatttcattactaccaacaaaacgcttgcacaggggcaatgagccccctacgactgcatgcagcaggcacagcgacactgcacagtgcaacggttcaggcaagtggaaagggggaaacggcagatgccttccacacgaacactttacctatcgtcgtttttccagcattcttcacacctttccttcacgctctaataataagatggatacgctctaataataagatggctacctgactgtccggcatttgcattcagtactgcatattcctggtggtgggtacaaccccatctttgagcaaagtctcattcatgcagtattaaaaagtgaactttgaccagcaaacactttctgtggaaaaaagccttgtggagaaaagtacttacaggaaagagtaattaaatttaaaggcaacattcaaagtcacatggacttgaaaagcaaactacaaaaagcaaaaaatggacaaaagggcacagagaaagataaccctccgggtgcaggcagctcaaatcctagtaagactgctccacccttcttgaatgtcagtcatttccacaggaacaaaatcgtgcccattatccactccctaactaccaataaagttacatgaagtggtacctagctttgtggttagcataaaatatcctagtaagaaaaaataagcaatttcatatgatggaatacataccaacccatgaaaggacaagagtgatgtaattttttagaaagtataaataatgaattcttagattagtatttgtgcacctgtcagaatgggcccgaaatgttttatttatggctaaatcctaaaaaccacagccataaaacatttaaccagctgtcagcacattatagtcatgaactgacactacctatgctatgtattaaacatggcatagcacaataattaaacaacattattgtacattatacaacaaacaaggaaagcctgattagccaaaggcctctgtaacacagccacgttaattatttggtggctgctggatgggcctttttatctttttcttgatcaccttgggccacctccttgttcattagcagtcctcagaggaggctggaaaaagacagtatgagatgcaactgaggattagcctactaatggaaaaattcaatagtttgcatcattttctacaggatatcacagatagagatgcgtgcaaacacatggatgttcagtcatctttggttaacatggccaatccaggactagaacattccaatcaatcctgccaatttataacacttcaatgaagtattttcatataattgtgtgtggatttcacttagtcatcctagctttgtccccttccccttatagtggaatttgatagacatcatttaggtaacaagggctagataaatataaatgatttgatagaatagagctggaaaactcaagttgccattggtaaaggaatttcctgttactcacccctactgtgggagaataccccacttgtaacttgtcttctgtaatcttcatttaaaaggaatatttctcctataccacctcaaagagcaaactttgtaaactggctcagaaacctcctcttaacccaaagcttccacaatcaatggaaagagtggaagtatttgttctcctcttccagcttgccatgtcagtggccccaaccctcacccttgccctcctcagtagttctttgtcttcttgatcttgacatttttgaatattagaggctcattcctttatagactgacccttggttctggttcatctgatgtttcgtcatgattagactctggtaacttttcacattaacacagaaataatgctatgtccttttttatacttattagttgactctctaaacaagagcttttacctctcccctcatttgtttatgtcatcaatttctatatcagtatggatttataaattattattttatttaattggttataattcattaccatatttattttgatggttaaattctcccaattagtccagtgggagcccatcaaactggcccctgtgtctttttgattctttgacaattccccctactttctggctcaactagatattcaggcccatgttgtactttccctgccccagcccaagaatgtagccatttctccaagtcatgctccatatttttaaaggtaacatgttgacttggtggtttccaatataaaaataagcatcaatctgttcagtgcagaatggaaacatcactggtcaatctgcagaaagtagccagcgagtgcagctttttccatgtgctcacttgcagtcacattgaaactggctttgcttctggccacacacagctgggctatgaaagccatgggcagctgaaggtcagggaggagaaaagtgagaacacagagatcagagttccaaagcaataatgcaagatggtggcaacaagggccagcacaccagccagtctgcttgcagggccaaatgtagcaaagactcttcagaaccagtagagcttgcccaggaggtgtgggttacttccctgcttgtgccaggaccaaattatttatcacattccacttgtcgggaaaattgcatctggttccattttacatatataattgcatagtaatctgtgactcatctatgagagagaaaatattgctatttgttcttttcagaaagaaaaaataaagcataaagaaacttgcatgcaatgctcagaagcaaggggagtttcgagttttgtagggcctgaagtctataatattttatcctttaacaataaaataactgtccgggcgcagtggctcatgcctgtaatcccagcactttgggagccaaggcgggcggatcacagggttaggagatggagaccatctggttaacatcgtgaaaccccatctctactaaaaaatagaaaaaatcagctgggcatggtggcgggtgcctgtagtcccagctactcaggaggctgaggcaggggaatggtatgaacccaggaggcggagcttgcagtgagccgagacagggccactgaactccagcctgggtgacagagcaagactcggtctcaaaaaaataaataaataaaataaaattactaattaaaaaaaagtaaagcacgactatatgaaatttctagggcccctcgctgaaccttgtaaagggctgtgcaagggaaggaacttgaggtcaagtttcattagtctcatggaaaaagtcctcctctgcccagaagtagttccaccttcttgtcatggaccactaggtcctgcactgtagtagactatttcttcaacgatgccagtcagcccttccactgttttgggagagtcagatcttccaggttctattccagtagacagtaccaactacattcctactcggtggccttcaaactccaccaatatctttcaacataaaacaggaaagcaaccagaactcccacaaaagcttgggagcaacctgtttggcagaggagtagagtcttgttgggtgtttgtaagctaacttcacctgtgcacaaatgccagtttgtctacccaagtgaagtgaccctgcagctaggatacctagaactgctctaatcaaagtccatccaaagtcacaggcacagtttggaacaggacctagaaactcaggctgacaggtgtaagcaatgctgctctccaggcagggagaaacccacatactgagtcttactttcatgttctcagtatctgctcccaccccgttttaccccatcctgggcttcacactcagtgaacccagtcaccattcactgaactcattttcccaccttcgtgctactgatcatgctgtttcctatgcctttaaagtccttcccatcttctctgggtagaaaaatgctgctaattcctcaaggcagatcagatgccaactccctgtgcagtcttccctgcactctctgccctgcgaaatatgccccttccctgctccctccaccctatgaaagtagaataaaatcattccaacttctgtgtgccaatcatacttttgtgtaagtctgttatagctcttatcacatcacgctgtggaatgatgtggagaaatctcaccagctactttacctgtatctgtgctgttccttgaatttcctgcaatctcaacagtacctggcacagaggggcttgaaaaaatgtttgctgaattaaagactgtagccaaaaggcaagtgttctttttcctttcacttaagtagaagcttatcttaattaaaataaaactacaatattattgggtttttaaattacgtagctgtatatagctgcatataattgcagtgcaatcaaacctctgatatttttaggcaactctttctcttgaaaccctccgtacctttgactaagtatcaatgtatttctccccaataagccgggtgtatacacgtatgtcttttaagaaactttggattgttcaaaatttcaaacatacaagcgttgccagaatgtaataaattgccagcgaccagtttcaactcatggcctatcttgtttcatccataccccaaacccacattccctttccatattatagaaagcacatgccagaacttatatctgtgaatactgtggagtgtacctttaaaagttatggcctattttcaacaatatagccataataccattatcacatctaaaacatatttaataataatccctaatatcatcaaatattgaatgagtgttaaaatttacagttgccccaattcttttgcactaagatgttcaacagtaaaagtacattataacttcattcaactcataaacaaattgccctatttaaataaaagctctgaattcatatcctatagaaccataacattcctcaggacaagacacatgaagtctcattttaatacaatgccctaattatgctgctgaagttttattaaacatttgtcctatggagatatgtaaaataatttgttttcagttcattacctttctactcaaagattttatcccataaaaacttccatatgagttagcactatttttgagttattcatagctcataacaatacattttatttttaagtcttaaattacttctttctcttcctcctgaaactcaagtgctcactctcaattaacacaaatgctttcactctcaattttcacttctaaaataaaactatggctagaaagaaactgctctcaatgagcaattcataaacaaatgaaatatgcaaagccacaaatatcccttataatttttatgtggtcatgcaaattaatgcataagagtaaatattttcatccacaataacacaaattaatgagtgcaggagactaacaccaagactgatctgggaggtgatcagtgccttcagcagaccccaggactacagatattcagaagcaagtgagagacttaagagcaggtacataagttcattttttggtgactctggacacatacaaaacattccttaatctggaattggaaacaggtacataaagagcaaaaagcaagtgtactcaatttatccaattgacatgtctctgcaaaacatttgtagggcaaaatcttaccattagatgaatattaaggtcaaatttttgtgaaattaagattcttttttataatgtaaaaatcattctttttcaattaggtttgaatataaaaagttttcccaccaaatacaaagaaactgaaaatgaaaatgtctatttaaatatagaaaatatttactaattcacactagtggaaggtgacatggaataatagaaaattggaattacttttaagtatatacaaatatatagagtacatatatttgccaaataaatgtcctttaagatcctttagttggtaattttatttgcaattatttcattgtttcccttttttaaaaaagattattctaaataaaagtagtttatcttgctgaataggttaaatgtccttcccatgcctgctttatttactattagtctgtttacaagcactccttcatataaggcaaaaagccttatgacaataccacaaattattaacatctgggctcaaattaatcaagttatactgtgttcttaaatttctgaattctttaccttttttcatgtgttcatgtgttcaaaacaactctataatatccagggcccccagggaatcagctcctattcaggaagatccttactcaaaactagccctcctgaaaatgacacctatatagagaacatttctcttgcatgttcagggctattgccaatcaccagaaaccaagacggtgtctattctacttcagtaaaaggacagggaggctgacaaagaaatacaaaagagaacacaagtcacgtggagccaactgcctggattcaattccttcagaaagtcacgttagagactgccactctaacctctaaccccactgcttcaaaagttgccattccctccatcctccacagctctggccacatccagacgaaaccattaaggctggtgtataccctacagggcaggaagtgaatcatgcttcactcaactgaaatggcagcaggtttttagaaagctaaacacagtcaacccaaatgaatggtaacacttaccttgtaaagatgtgactagggattgttattgatgacaaaagatcagcacttgggtttccatctcccttcacagatgagatttttttaaaagcatagggcactttacatacagacacagagtatagctatggagatcaccttctgtaatactagcactcagagtgttctcactattaacccaggacctccactcatgttagatctctagcttgcagaacatgctgagttccagacttggactgtctttcctcttccacagcagaatttaaaaagctctatttcctcttccttagaaaaattttaaagttctcaaaatggggatttctctagtctcttccttttacccttagtgtgatctggggtgatttttagggtcttattacaagcaaaatcctaattatggggaaagccattatctggcatcttatttactataacccaaagcaaatgtttggggttcctaattatattgatccaaatatctccctcgtattttcttacacacttactattctctttcaagtaagacttttaaaagctgtttctaaatttacacttttacttggtgctgctgaccacattaaaacctaacttccaaaaataagttaaactttaatgtggttttatgtttttaagcatactctaactatataactttaaaagtatgacttacagaatatttatttccttaagaaaatatacaaatgcttaatcagagacaaagcaagggattccaaatcagttttttatactgcaaaatattgcagtgagccatgattgcaccactgcattctagcctgggtgacagagcgagaccctgtctaaaaaaatatataaatatatatgtatgtatgtatgtgtatacaggtatatatatatatacacatatatacgtatgtgtatatataatctcaaaattattaatagagaatagaaaaattgatctaatctgatgccaccttccaagtctcataaaaatacaaataaaatgtttctaaattataggtatatccttaataaaattacaaaaacatgagattatcaaaggagcccaacagtttctctaagcacatcagacaatatcagaagtcaatagttcagattaagaaggaaagattaatctagtaattctaagggtaatttgtgttacacatttttaaggattttcacagataaccacgcatggtaatatatgcaaatacacaaaagaaataaaaccttaaaagaacacactaaatttattttttttaatcttctaaaatgagaatcatgacacccacagccggcatttcttcagagcctacagctagacaaccaccacaaaaaatgttctctctgatatcagctacaaccaacccccaggttaaaatatttgtgggtttgttttttttttttccctaccgtgttcaatcttttaaaaattaatagtcctgagtgcagtcttctggaaccagaatgcctgggtccaaaccacagccctaccgtgtactagctgtatgacttttatccagtcacttagcctctctgcgcctcagtttcttcatctgtatatatatatacacctatctcattaggttgaagattaaatgatctaataagcatgaaatgcttagtacagtgtagtacatagtaagtagcatataagtattagctaataataataataaacaatgaaaatgaggatgaggtagcagaaccataaccttgactacctttgtggaacctctattccagggtgaaaatacagataccaagagtatataacattgaaaatattttggggcctggtgtggtggctcacacctgtaatcccagcactttgggaggcgaaggcaggaggactgcttgagcctaggagttcaagaccagcctgggcaacatggtgagatcctatctcaaatttaaaaatatatattttggaaagcctcgattcatgcctctggtcaatattcataaagtattatggcccattggaaacgatcatgctgtagcagggaaagagagcctaacattctctccgattgcaaaaataacatgcgtaagagccacttctgatcaagtaacccaagttgattagattctgttcacctcccccacacaaggcctctgacggcacacacagaatggatgcagcatcctacattctaagtgtaatcattcaaaccaacctaatcatttttttgacaaaggatttgggaaattaatgtaggcttgttagccaggggaatggtagtaagcagcagcttcagtcaaagctagcttcaatacatacattaacaggcaaggggtatggtggcattccccagagaattcaaggcaaaagtcaggtgtggtatatgggcgttttcagaattcaccccgataaggtcaacctcaagatcttattctcacttccaatctcacacaatagaaaaacctattcagtttccactacataacccttcctagagaccactttaaaagatgttactgtagtccacaatttttaataggtgcgcttgaaatggcattgtaaccatttgcccactcacttcaggaggcatgaaaggaacccagattcagccattaaagtcttacattagacagaaatcaacttaatttaactaacctagtaccttcctagatatacttttcttacctttctttctcacatctcatgaccaatttgcagatatgcactgctggtttagtgtacctaaatacagtcattacagacttcttctatcgtatcttctggagagacattttgggatacacaatttttttttcttccttccttcctgagacactttgggatacacaattttttccccctccctccctccctcccttccttcctcccttcctttttttttttagatgaggtcttgctctttcacccaggctatacagcacggtggcacaatcatagctcactgcagcctccaactgctgggctcaagggatcctctcacctcagcctccctgctagctgggaccacaggcacaaacaagatccacaatatttatgcatttgaagacaggatctcttatgtggtcaaacatctctcaatctctctatttagtcaactactattagctattctagagaggaaaattagtaattattgtgggcttgaaaagagagttccaatcacaatcaagtttgtctcctgaggttaaaagctaaccaaaggccgggcgcggtggctcacgcctgtaatcccagcactttgggaggccgaggcaggcggatcacgaggtcaggagatcgagaccatcctggctaacacggtgaaaccccgtctctactaaaaatacaaaaaattagccgggcgtggtggcgggcgcctgtagtcccagctactcgggaggctgaggcaggagaatggcgtgaacccgggaggcggagcttgcagtgagccaagatcgcgccaccgcactccagcctgggcgacagagcgagactccgtctcaaaaaaaaaaaaaaaaaaaagctaaccaaagtgtgacacctacaatgtgaatctgagtgcctcccctaatgagtaatgagcagtattaaattacaggttactactgataccatatacaaaaagctagatgatgtcttataaaagtagttattaaccaaagacaaattaacaaaacctttggttaaaaggcttcgtatcattcttgatatgatatcatttctgtttctctatttccttattggtacatgaaactgcaaatgtgcctgatgtagattaatattttaagggtatccaatcgttaggcatcatgcctccacattaatcttttgcattttgttgcatataatccttttcccacagttctaattttagatatagttagtccatcagaattaatcttttcccatataaagactggtcacagctaagatcgaatagtttctccttaatctttttttttcctcatagagaaacatatggattattttattaactggtctttttactctcttttcattttgaaattacaaacagatagggaaaaggtgtccttcactgcttgttcccagggctaaagcactgcagtaacgttcggttcacaactcaatagcatccttgggaatgggttacattgtggcaatctttatccattattaaaaatacacacagtggttttatggaaaatgtacttctactatcaacaaaaatcttttgggctaaacaccgaatccacactgagggacagacttaactttaagcttctaatatagcctgcacttttctaagtttacagaagagttgtttcactgaaaattctgccagtggatatgctgcaaagagaaatagcaaaaagcaaagtcattttcatttggacgcataaaactatgatgaactcaggctcaatttcttggcttcttaaagctttgggattgtttttatcttgcacagtggtatccgaagcagagacatttagctattcctaattgtgccaaatagatacaaatattaatatttcactggcacttaccatggccaaggtgaaatttaaaatgttaaatactccttattttccaataaataatgcactcttggaagccttagaagactatcccagcaactttacgacatagcacgtccttcccttgattctaatagtaaacaagttccaaggttcttctacaatcaatttctacaatcaatcagaaatgttctttggctggcaatcatgactaaagcaccactttgaaagggaaaaagaggtgttaggctgtgtagactcaaagtagagagaaagccttcattgttatatactagccactgatttagcctacgctgatactcaatatggcaaagcaaaaactagagttttacagacatactttgttaactggctttaatccctcaaagtgatatctaagtcaaattttaaagaccaagacaaaatttaaatatactagaggtatttatacttaaaaggtactgaagggaactatttatctaaagaaaatgttaaaccccaatttcatagcacatgccactgctcaatagtgcatgatatggtttggctgtgtcccaacccaaatttcatcttgaactgtagttcccatgatccccacgtgtcatgggagggacccagtggggggtaactgaatcatggggcagttacctccatgctgttcttgtgatagtgagttctcacgagatctgatggttttataaggtgctttcccccaacttcactctgcacttctccttgctgcccccatttgaagaaggctgtgtttgcttctccttccgccatgattgtaagtttcctgaggcctccccagccatttggaactgcgagtcgattaaatctctttcctttatgaattactcaagtcttgaggctaatacagtgcaattttgagtgattttttttgaatacttattttttaaagtaggtgagaaattgattcttctcacaggaataatcaaacgagactttttttttttttttttttaaacagagtttcgcttttgtcccccaggctggagtgcaatagcgcaatctcggctcattgcaacctctggctcccaattcaagcaattctcctacctcagcctcccaagtagctgggattacagacctgaaccaccacacccagctaacttttcatatctttaatagagatagggtttcaccatgttggccaggctggtatggaactcctgacctcaagtgatctgcctgccttagcctaccaaacaagtccattttataaaaccattttgggccgggcgcggtggctcacgcctgtaatcccagcactttgggaggccgaggcgggcggatcacgaggtcaggagatcgagaccatcccggctaaaacggtgaaaccccgtctctactaaaaatacaaaaaattagccgggcgtagtggcgggcgcctgtagtcccagctacttgggaggctgcggcaggagaatggcgtgaacccgggaggcggagcttgcagtgagctgagatcccgccactgcactccagcctgggcgacagagcgagactccgtctcaaaaaaaaaaaaaaaaaaaaccattttgaaaatctaaaagtgccatcatttcttaaaataaatcacaccaatagttaacttgaagtaaatatctttaaggacttcaaatacttaagagtttttaacctgctggtaaggtctgagctttcctgaaatacttttcttactatctcatcctatttcctactctctactccaatctctcctattctctagtaaaccaatatggccatgatactcaaaatcagacaaaaatagaaattctgagcatttcaaacttcttctaggtaaagctctgcggttttttttttttttttgctctgtagctttttaaagatacagctacaatcaacaaaggactggcacatttcagaccacagctacttttctactacaatgtgacttcatatttatttagtcctatcctgtcccaaacaaggtttgttaagacagcttacaaaaatacacacagaataaaccataaaattatttataagggattgacaattttggaaaaaggaaaaaggtacatttatgtttatattcacataattataaaggtctaaaaagttaaaccccaacttcatagtacatgtcactactgaatagtataattgtgagtactttttttttaaagatgtacttttacaagtaggtgagaaattgattattctaagatgtcaaggtgggtgaacttcttgaatatattttcctattttctctttctctctttcaaatgtaactttcattaggtcttctgttttctggttcctaagtctgatccgtccagagggatgtcatttcgagccacagaaaaaaagtacagcctaccccatcagaagactcacatctgaagtccattattgttccccaccacttagatctgaataagataaaacatttaaggagcaaaagtttttaaattctattgtgagggggccaacatctttcaaagatggttgatttctttttgtgtaggcaggtgctgcatagactctgaataataaaatgaagttggggaggtaagaaagaactcattcataataaaaaggataaaggtgcagggaaaaaccctacacctttgtaaggcttctgaggtggtgcgaggtgagaccttttcttaggcagcttcacaacaaataacactgtttttgcatcgtatttcacaatgaaccccaaagcgactaaggcttgaaatgaaaatcccttgttttattccagtttttaggaaaaacccagagttctcccctagaatttccaaacatatatcagtaaccacttactagctttctctcttctcagacttctaccttgagtagtcaaaatgccttacctaaccttgcccttttctctgacgtttttaacaatcacacgttctgcccttcctctccagtttccttgaggcttcttgaacatctagtctcaatccaccacactacgcacactgtcgtgtctatgttagcaccttgaaatctgtgcatagaaagctgaaaatgatggctactctgaaacattgcccaagatacaaccttcttgattagctcctcaatatgcccaagacagagccatactgacttatttcgtggctcttagctggtgcctaatgcagtgaaaaccccttttaaacagcactgactaggtatggctgggagagtttctaggagggaaacacgctcagacatctccaagttttctcgtaatttgggaaaatataaccattaggaagtgttctcttaagcgtctggagaccttgcacaagttacccccaaaagcacaataaaatctaggtgaaagaatagaagaaatcaaaagctatcacaaaatagaggcctaagcacctctttaaaaagcaggaacagctagaaaagtagatttagcatttggacattcagggtttaccagacctatttgcaatactaattagtcttaagttggccctcctttgcagtcctttagctggtaaactgctagaaaacatggattacaccttgttattaatatagaaaagccctggtgcaggtggcagagccatgagcaacctgaatgccatgattagggtcatgacgagagcaattccagtatctgaaactcacacagaagcaagcctcacaggcaaatacccagatgatagaggccctatatccaatgccaagagtcagatgctacagcgcagaagcaacaaattcttccaaaagaaatgattcatacaaattaattgttttctaatgtcctttaattataattaaagagtttgagcatcgactttggttttttaattaagcccaactttagcttatttttctatattctgaaatttagacattcaattcatgtatgttctattaaaagacatgtcaacttatatcagaatataaattaatattaacacatataaatgatatatactgaataaaagaacattttaaaataaaagctactcaaatgtgtataatatgaaacaatgaagaattcaccacaaaaagtaatttattggagccaggtgcagtggtacatgcctgtagtcccagctacttgggaggctgaggcaggaggattgcttgagcccaggagtttgaggccagcctggaagcacagcaagacattgtctctaattttctttaaaactcacttttaatttaaaaactttaaaaaagtaatttcaaaaaaataaagacgtttaaaaatgtattggtcatcacatgactttattcttatttgtcctttgcaagaatccagattatatgacacatatatacttactcatgcacaaggcaaactgactgaccacatcactcctatgtagaggagaaggtacaggttttttgtctgtctctttgtttgttttgtagagagacagggtctctctatgtagcccaggctggtctcaaactcctgacctcacgtgatcctccagccttggcctcccaaagtgctagaattacaggcatgagccacagtgcccagccataaggtacaggtgtttttgttgttgttgttgttgttttgagacagagtcttgctctgtcgcccaggctggagtacagcggtgcaatcttggctcactgcaacctccgcctcccggattcaagcgattctcctgcctcaacctcctgagtagctgggattacaggcacgtgccaccacaccagctaatttttgtatttttagtagagacagagtttcaccatgttggtcaggctggtctcgaactcctgacctcgtgatccacccgccttggcttctgaaagtgctgggattacaggcgtaagccaccgcgcctggccaaggtacaggtgttaaagaggcaataccattattccatttaatggaccctcttttaaaagagtaataataataataaaggactgtaataagcattgtttaaaaaaaaaaaaaaaaaaggaagccacacatattcaaggcattccaacccccaaaaggtttaccaactacttgaaaggggcccctcttaaatgtgaggtctcttccctcatacacatgccgtttcttccttagtcaagtcagcccctcctcttccatacgtttcatccactgcctctactgacaccatcctattgtaaaccctctaacaaaaagccaggagcttccagttgccaaatcccaggagactggtccttatctcgctgcatgtgattatgctgactatattctccttagtgtttactacaccactctcctggtgctcctcgccaactggactgttcctttttcatctcctttgaaggatcgcctccttcagaaatacactgaatcttgtgtttcccaaagttcctgccattgttcttctcttttcctgctatacgtgctttgccaatttcatccactctgaaatttcagccatctgcaatgtctatacccgcaacccagacctctggctaaactctagtcctatacatccaaatgactaccagacatcccttcagaatggaccataaatacacccattaaacgtcgcatgtccaaaaccaaacatcttccctccaaaacctaaattggctagtaacaccattttccaagccagaaaactggaagtcatccctgatttctctcagtcccccctgtctactcaatggactccttaatatattttgaaaatggtctcctatctccatctctacccactactcacctacttgaagcccttcaacatcttctgctgagtattctgtaacatcttcaccgacctccctccacccagtcttggtctcaaacctatctttcgtatggtcatgatgacatcacaccctcgtttataatcctttgatagtttctcttctcctatgtcatagggcttatgcttctgagcgtggcagataaggccctccacgtcctaatgccttgcctctctcaccagcctcttcttccaccactttacgtcctgagctttctgtttcaacagcaccaaaacactcatgattccctgctcatgccctgtgttttgtaccttcatcctccatccatggagccctcaggttcttgcaggggaggggcagtaaaccagatggttgtcacttcaatgtttagcccagcatctggctcctaagcggtgccatgtggccagtcagtgataaatgatgggagacagtatatggtatgtccaaaaggagtgacagaaagtgtggagggaatttggactcacattgatagtcactgcaatggggcctaaacatgctaagcaccttccacacgagaggtatagagagccagcaaaagctcgactcttccatctaacaagcaccacaaacctagagtcatgctctacttttttggagaaaacatgttggcttcccactgagcctgccatcatgaggcacaatagtgggcatcttggtggtttgctaataataacagctgatatttatagaaggctcactgtggatccagaactttactgaaaattctacaagaactgtatctctcagtcctcacatcaacactatgaggaaggaactactgttacccctgctttacaggtggggaaatgaggcccagataccaagtagctgtactaaaagcacagagatttaacctcctggaccttattcaccagaacgcaagccaaacctccatatacattttacttacttcccaaaattttatgtgtacatcaagagctgatcataaatagaaggtcaaagtgacctattgtgacatcaaatcttggagccactttaatgtgacttcactaaattgccttcgtccagtgcctcacagacagcatcccagcacatcatggagagctaagtgacagaacaggcagctcctcttctccctggtgaggccccttctgctgtgccctggctctcttttgcccctcatttgtccatattcctctctggtttgctccaaactcctcctcctaccttcaattaagatggtgctttagaacaatacaaggtaagatctcttcttcataaaaacagagaactcatcacacctcaggaggtgcagaagccaaaaatactcataggtttgagaagagtttagatacagtcacagatgagcgaagatgagggcagtatggagctcagagaagaaccatgtgctgaggaacaacctgcagggctaaaaatcaactaagtccatggatatgtatggagcacctgcaatatccaaagtactatttcagacccagcagcacccctgcctttaaggagccccaagctctgaccactacttgggttctgttagggaatgtcagctcagagctccccatgggcaatgggatctttgcagcaggagtatccttctaacaccaaggacttggagctcttggaaagcactctgtgtgtcaaaaaagggtgcacccacacaggctatccccacacaaaggcagctgcagtggtcctctagatgtgtgctcaagcccagagaagactttgactgtggcaatttgggagggaaacaaataaagtagacagtatatcttcacaacaaccatcgctagtgggccacatgcagggcaagagaaagaactaacaccccagcaagccagaagcgtctccctgtccttgaggtcagggcagagtggagagacccaggcagggagtaaatggaacaagtaacaactaggtgtgaaccttcaagatttcccttccatcacgctccactagcataggtagtcttccgaagacctaaatccactggtctccttctaggaccaacatcgagaggtcatcagagtcgtagtcacacagcctcaggagcaataatgtccaggtttgaatccctgttccaccattcattaactgtgacaaatcaacaaaactctcgggggactcagtagcctcatcttttaaatggaaacaataattagacgagcctcagaaggtcattgtgaaaactgaaagagatgataacatgcaaagcatttaaaagtgtctcacactcagaaaatgtgagctgttagtattatcacttttttccatcagtgggaccatggaagcccccttctaggccatgacaaattgtggaccccacgtagatgctatatgcaggaataacttagaacacaagttgtcccgtttgaaggtcaaaccaaaattctacaaagaaggtgactctaaatcccccctacccccaattcttatgcataccttctttgcatgagacacttatttttgatcaaattaaatcaaaactgatttcagctgcagcacatagttttaaaaggtaaagcagaagagcaggtagattttgcctgcttgataatttcccttggttctctgaaaagacaggctgagtctcagtctgccagagagaccaaacgtgtagaaacgaaaggaagaacagaaattttcaggctgctgcgcaatccatacagcaacgaaaagaccccaagtctaactggtgattaagaatcaaaacaaaacggccgggcgcggtggctcatgcctgcagtcccagcactttgggaggccgaggcgggcggatcacgaggtcaagaaatcgagaccagcctggccaacatggtgaaaccccatctctactaaaaatacaaaaattagccaggcatggtggcgtgcacctgtagtcccagctattcgagaggctgaggcaggagaatcacttgaacccaggaggcagaggtttcagtgagccaagattgtgccactgcactccagcctgggtgacctgagcgaaactccgtctcaaaaaaaaaaaaaagaatcaaaacaaaacaacctaatatttgttactattctaatgaatccgcaattgtggaaaacgcaccaataataaatctaggtgttagcagaggcacagacataattgaaagataaaagacggataagaaagttaacttgggaaaaaaaccttctgtttccaaacttaaaccaaataggtactctttttgtttttcaattgtggcatggggcaagcagtttatccgtgcatctcagcagaatcactatgtaaaccccaggccaaaaacagacatgaacccttagaattgaaggaacaatgtctacgcttacagactattgtttgcatatatcgtgagtcctataggttggcccattttctcacccccataattttatctgcccaaatgcatatttctaaaagaagttcaactaaaagtggtacagtattatgttgtatgagatagtctcctaggaagaaattgagagtctaaaaaattgttctgagggtcacctatctgctacaaaggcctgaacactgcagcttatacaatgatttttaaaaactgattaaaaccttttggatattatttggccttgctgaaagaagagttttacttaaaaatcatttagaaattgcatttttaaagtatgccttggtttcaccattgggtagcagacggataagtgtaactgaaagacaagaaaagtggccccaactaaccagaagaaaagcttacaggcctagcttacaagccatattacaagatgctagccctgaaattcaggactaatgctgtaattaataaggatatgatgaaatagtcaatattatgcaggttcattcaagaaacatttattgagttcctcctatgagtcagatccaaaccttgctttcaagttgctcaccacccagcgctggccactcacccataagcaacacaggacaactgccacgtcatgtataaggtgctaggagagcatgaggaaagggaagacccaggttctaaatagagaggaccagcagaattaggaaaaatcccttcacatcttgctgactagccctaattctactcaccttacttccaagcagggggcatgcacatacacattcaattaataaactattatctgctggccaaaaccctccagtcatttcagtgaaggtcaagccctcttttgtttctgtagtggtggaggactctaggtagccaggaagaaggatgcagatattcctaggatttaaggtagtaccaataacgctatgcaaagttactaaaaatttgaaatctgttccttccactgtaacgtgcccttaaaagtcaactgaatcaaaccttgagttgtgtggtcctaaaagatgaagtgacttgctcaaggtcacaaagttcattgtagcagtggtaagggagtagagggaagagctctgcacaagaggcgggcttacttctcctgcagacctccatgctacttctgctatagaacttagtacagaggcagaaggtaccttggaatttgtgcagaaccacaaagatgctttagaaggtaacaagccaggaaggaaaagtagaatggaatttctacaagctatctctaagaaaagtggagtaacttttcctctcaccatttcaaaaactaattctgggtaatagtcaacatccaatgtcacctaccattccttgctctatttcatttttttccctccctcttccatctagctctcccctccatggcccatctcatccacctctgccatctccatgtccaagttcaggggcagcagtggtatgtgatgttggcagcagtgcccaaacatcagcaatcagtctactgctgtcccagcaccaagccaggggctgtgaagggtgaaggtgaaggctctttgggtcatctgacccttgtctccactcaaaatgagacaccagggtgttctccacccacatacattcaggattgctgtctccagtctctatttgagacatcagagatgtcatcatttccatatgcttctcctaataaagtaacatccatttaaaggcactgcagtcatgagtgtgtatgtgcggcaattggataaacaggtcttgttcaccacacagaggtgccagggtggagcctacacccatgcaatcactgtcctcaggcccggcccacactctgcagcttgtacggacctcttactggtacacatgctcctgcaatggcaagttgaagaatacagaaaaggaggagaggcacagtccacgaatgctcgtgctcccttgcccttctctcctgtaagaaaagagtgaatccacaaggagctcagtaaaaaactggaaaaagggaagttcttattagtgtgttgacactcgttgcaaagcttggcctatctcaacaagtcactttactttccaatataactggtccctcatagacaaagaaaggaaaaacaaagatgactctcagatacctgtgcttctcacagctgtgcagtcaagacaaggaaaaaaacgccttttctaacttcctctggcactaactggaaactctggactttggggaggctattagaaaaaggttaaatatgagactagataatgatataccaagggacccatgtcagggctgtttgaacactactcagaagcaattgctgttgagagttggcgaccactttaaaagagctccgaagaaggcaacgtctgcaagcaaatgccttcgtggtgccctgggaagagcaggctgaagacttctcactttgcacgaacatccctgaaaacatttgttcactgttctgtaattcaaagattactaggtacacatatctagtaattatttcctatatgcggcatattttcttgtattgttcttgctttaattttagtttcacaaagacatagctttacatatgcaactgtaccctcccccttcctttcaatgagagctgtagaggtttttggtctacatcgtgaaacttcctatttcatttattctgaacaaattggtcagtccactctttgataagagtttattacaaaatgtgagtgctgactataagtactatcaaaaatatgttgaagattattttgatacctgtatttattttaaaaggaggggagaacagagatggatttctatcaaaaggagccactatgtgctgttacatgccatatacatggtaaatatttatttacagtgtttgactaggtttaaataaaagccaacaaaaagaaaaaaaagagagtttactttaaaagtcctatttgtgtaacttaaaaattagtatgtaactctttcctgaacctaaaactacagtggtcctgccttataaaatttgtaccattacccaaagcaccttgtggtatcaattacagggttatgaacaaccagccactaaagctatctgattggcttaatgtcccctggtgctttataatgataactacatagtatataattacacagtccccaaaagatacttataattgaatcacagggcattttttgaatgtttgggacagcaattagaggaccacaaagtgatagtattgcaactctcaccagctagaatgtaaacgaagcaccctaaaattcaatcataagagtccttcaggtattaaataattataatacaaatcacatggaggggcaagtttttttttaattgaactgtccccataaccgtggaagattatatttcctaatagtctgtaaaacaacgtagctacattttcagattcctatttcttcatccaactggaaaacctgtagcaaaggtagaacagtcaaaaacctgtttcttcttttactttgccacctacttatttggtgacctagtgagtaagctaggtctcactgtcgctccactcatcctataagcatgctgcataatcagaatgtctgtctcattctgtaaacataaaatggctgtatgtatacagatatttacagatttaaacagaaacaaggatacttcatctatttgattttttacccatacttaacacctcaaaatgtatgatcatttttaccctcaccattttcctctttctccaactttcttattccatactcatcccttctgccatctctcccatctctccctccagggaggttgtgacagttgtattaaaacctccaggactggctatctatgactggctccacagtgctcagggcaagaagagtcaactgcaggtcttttgtggctcattatcttcttgcttccatttcttaaagggagaatatgtagattggtcccctaacttaggaagtacggggaaagtaaaaccagaaatacttcccctaactttgactcgtataaacacattaaggaaaggaaaggttgaaaggatgttcccacactcaaggaacttgtacaaccaagtcaagcgaggcaagtcaagaagaaaacagaaccccaatcatttctccagatgctctgaatcacctccagggcacaggcatagatgttccccaaccctgaatgctacagcaagtgcatatctacttacagcagatttgtaaacagatctattctccacttaaaaacattttttcaagaccagtgattaaaaatgtaaaaactaaagcctgaaaaaatatcagttccccttgcagagcccagtgttaaaatataaactccgatgagtgattagaaaaacaccacagaaataaatatacatatacatacatgtgtatttttttccagtagattttggccttttaatgacatttgttcatgagaaaaagaaattcgcttgtcccagcaccataaccccaccaaccttcatgggtgttctgcaaaaaaaggtcccacagagaccaagaatatggtgacatttggtgctcttcgatcagagtgtgaatatcacccgttttctccttttagctcttgcaataaaaatattctcaggcacgaatcacaatggcacgggctacagcccctcctcatggagtgtgattctctctgagcctcgccttctgctgcgtttgaaggaacctctcccaggaccgagtagccctgctggatcatcctttgcactttggaatcaaaagaaaagaaaccagaatgggtgtccataactacagaggtgttgaagtcataaagggctcaggaggatggtgcaactctggccacagtggagcacactcacagggcagccaaggagacccctctggaggaaagtggagttaattagactttttatgcacatacacatgctggcttcacacatttaaaaaatagacccatgctcagcaaaaggcctattttaacactgtcttgtaaaaaccacatagacgaatactctatctcctttctagcagcaaccctggctctagacacttgctgattttagctatttaagccttaagaataaagatgtcatgtgcaaagtgctctgaaagcattaaaaacaaaacaactttcactcctacaagaagtactgagcaccaatgaattaacgcatttaataattaattggcatccttggaggaaactgtccctctgtaatgtagccactgggctgctgtgaaaaaagattccaatttatatttgttgaacaaatgatttgattagtgaccaaagtaaggaggagtgaatgttttccaagcatgagcttttccacatggcctgggtcagccaccgtacagcaaggctggcatggggccaagagccctcttgccaatgagactagacgtctctgaagagccaccatacacccaatgccgagagagttccccaaacaaaagccagccacggagttcaacaactggcttgccatggcaccatatgctccacaatattgtcctgctgcaacagtggggcctgtcttcagtgtccccatgtgctgcacagctgtcagcccaggagctgttttatcattattttcactgttttattacttttctgggaattcaaatcagtgtaaccacgcttgatgcgccggtgaaaaatgctatctccctcccccttctccttcaacctaatgaattgccttttttcataacaaagagtaatgagcaccaaaccacataatatttattcaaggaacaaaagacttaagaatggggtggcaggaagaggagcaactcctgggtgtggacagaagaaaagctggacgttataacagagcccctcacactgatctctggtgacagtgggttcaatttatagggaaatccaaaccttttggctctccccactcattcctgggaggggcttccttcaagcaattccctagttcatgtgtagagaccctgctgctgagaggtggcaggagccaaatgtaattcatcccatagccttgactgtgaagtgtctgcacattttatttttcagtgaaattcccctaaaaagcctcctcttgcctctctcataagcaataagcccagtatatcccaaaatgttctagatacatcccttcccctcctcccccaccgcatattatcatgacctccattgtggatgagggcataatttaacccagggagaaagggccacagaaataatggcgatactggagccgtgtttatctcagatgacatgaatcttaaccctccccactttgtgccataatcaaccgcttatactttgtcaagttttcttattagtccagaaaatacaaaataatgtacgatattaggagtaatttaaccgaacccatggttaatctccctctttatagacatgggcagtgtttaatcattccctttgcaaaggatccccaaattgggagaggctggatggatgactaagtcaagttggtgcaaaatgagtcacgtttcttgaaggtcacttccccaaatgtatgagccaccaaagggaaaggaaaactatttcttaaggtaagctagctattaaacaaagattcctcaaaaaatgataaacaatgatgctaagaaagaggttaaagttaaagggctatgtgaacaaccttaggaaatttagcaccagtggctgggttgctttttcttcctcccatttcattattcagtattttgaatttctccatttaaaaattctattttgaaaattttaaaggagattttttgtttttgtttttgagacggagtctcgttctttcgcccaggctggactgcagtggcgctatctcggctcactgcaggctccgcctcccgggttcacgccattctcctgcctcagcctcctgagtagctgggattacaggcgcccgccaccgcgcccggctaattttttatatttttagtagagacgggatttcaccgtgttagccaagatggtctcgatctcctgacctcgtgatccgcccacctcggcctcccaaagtgctgggattacaggcgtgagccaccgcgcccggcctaaagaagattttttaaactataaacaaagtttaatttttttcaaaaagtcacaaaagtagtcacttcttcctacaacctgtgccacccatatggttgtgggttttaacattgaaaattttctttctagataattttcctcaagcccagtaatcaaatatttttctaagcaatcctcttgcttcttcctcttacagtctcattcctgtaagtctgtcaaagctaattatctcgctcctcaaatttattgctctttagtgtatcataaacacatatattacaaaaagttgaagaaaacaagtgtgcattacactttgaaggaaaagatagacataaatattcaaagtatgcactatctttgttaatagagtaatgaaaacggcattagaaaaagtggatgagaatatcaaagccagccaatcctcctttcttcttccatatatggtggtccccacccccagaagtcaataccagaaactcctacaccattacttcagaataaagaggaaagcaaagttctctagtctgcaatcctttgacattccagaccacagataaacacgaaccctaccaaaccagtaacacaaacaacctgtgcctccgtggagggcacgaaggcatgattctcacaggcacaatcattaagctcctttacttgaaactactgttacatctttctgaaccttccaattccaatctcaaccacaaactgaaagttaataaaaagcccctgaatgattcatataaatcctttaaatctaagaacaggagccaacactaaaaaagcaatagcccatttaaatttcaatagcttgaatgccagacatccctgattgtcacattttgtcacccaccaagtcaccatttcatgttcctagttcactgtgggatccagacatattccactctaacaaatacaacttgccagaagtatttctgagtgtggttatttacgattttcacaaacaactttttcaaatattccttcaataggttctaagaattaagtagcatgaaatccaaatctaaaatcattgtctccatgcttcattgaagaaaatgaacgtgaaaaaatccaatagcagctgcaaaccatttaagaattcctagttaaactgcaaaatacattttcaaccatttagccataacaacttctaaacggagaaagttgcttctttatataaaccacctctgtttaccaaacatcagagaatctccgggcagagggctactgcaggatgggaatagtaagagaatgttacaacccatgaggtgctgatctgcacacaccaccgtgaggaaataccttaagtgattaaagacaaacgccacctgcatgcttggcaaaggagtccactgctatcgccacacactctccccagtgagagaggggaaacgatggactgaagtcccacagtggattagaactgggcacaaaaggagccaggaacagaagatggcagcataggaagggaatgttatgctttgccccagctggggactctggcagtattatcacttaggcatcctgaagcccaaactcaagaataaagaattaaaatttcatatcttctttgacttagtatccagaaaattttgttgaattctgacatatctcaaatttctttgcgtatatgttaacaagatactcctatttataaattcatatggctatttggctattctgtcaaaattagcctttaggccaggcagagtggctcatgcctgtaattccaacactttgagaggccaaggcaggaggatcgcttaaaatcaggagtttgagaccagcctgggcaacatagtgagaaaccatctctacaaaaaattttaaaaattagccgggcatggtggcaggcacctgtagtcccagctactcaggagactgaagcaggagaatcccttgagcccaggagttggaggctgcagtgagctaagatggtgccactgcattccagcctgggtgacagagcaagtccctgttgtctttttttttcttttcttttgagacagagtctcactctgttgcccaggctggaatagtcttgaaactttgccacatttttctttaaagaaacggtctgaaacactcactttttgagttatattaaaaacaaaaatccagctgggcacagtggctcatgcctatcaacccagcactttgggagtctaaggcaggaggatagtttaaaacaggagttcgagaccagcctgggaaacaaagcaagaccctatctcttaacaacaacaacaaaatccatagtaaggttaagatttgattttagtcatttattacctattataaatcatctccggactctttcaaataaaaataaaatgttttccaaaggaattagaaattacatgtttattgcaacagctgtaatctcgatagtctttggaaaatagtttttatctaatagttgttataatcagatagctatgaaataactagtattcaaaacatttagataaccatttatctataatcaatataaagggaagtgtacgtcatgcaaaatgcaagacagttgtctaccttgcatataggtgaaagtcatccttgaaagaaaacattctagtgctagaaataaaagaaatagaaccatgaaatattagaagcaaacacacaaaaaataagatggcactcctcagagggacagtagagtagctaaactaaagaattaaggaaaagttgtaggttgaaattttattgcatgaccagagcagcacctttaagaatctctttatttggggccggacgcggtggctcacgcctataatcccagcactttgggaggtcaaggcgggtggatcacgaggtcaggagttcgagaccagcctggccagtatggtgaaaccctgtctctactaaaaacacaaaaaaattagccgggcatggtggcacgcacctgtagtcccagctactcggaaggctgaggcaagagaattgcctgaacccaggaggcagaggttgtagtgagcgaagaccgcaccactgcactccagcctgggtgacagggtgagattccgtctcaaaaaataaaaaaaaaattaaaattaaaataaaaaagaatctcttaatttatcatactggatggcctaggtgcaagattaagagagaagtttttaattttatgtatacaaccaacttttgctatttaagccactgaaacagaaggcacctggctatctatggaatgaggaagccccctttcctaaagcttacagtgagcacatagctgcattaacttagctagccaaaggttcagaataaagaaggaagcaataagatgctatgggcccagctaaatggcaaaaaaaaggctaaaccaaatctagatcataaattgaagcataatacttagtttattggaatcatttggtagagaatgacatataaagtttaggcgccgaatcacgtacattcccacccttggtttatctctctgggtcaaatcattgccacatgtaccttgtacaaggttccaggtcctattgtcactgtcacaaaggtggaacatgatatggtgggacaggagatggggagaggagaaacattcaaggccaggggtatgtgaggccaggagacagcaaagttggggacctcatcataaaacagcagggcctggcaagaaccagcactaccatgtccctgaattgtggctcctgttcagaccaataaaggaaagtcaaatagatgagaactgctctttgccaaaacacggctatttagaaaatgcagttgctcagacaaccttttcaagaagaaacactgcagtcaggtgaagacagaaaaatatagtagccaagagcacagattctggagccaggttgctccagctactgtgaaaatatagacgataattattattatcttagtgtaagggagctgctatgccaaagggaaagcaaaataactaagaactctgatgaagggcagtcttcagaccactgcagcacctgtgtataatgaaaactgataggacttctcactgtctaaacaaatgctataaggtgcctgtcgaagcaagtccattttgatgcattttctacagttggccaggtcagcaggttgttattaccatgttacacagatgactggattagtcagggtaatttaacctgtaggaagtggcaactcacagacctgagatttttatgaccactccaatctgcacccacgaacaccctaggttctgtatcacccactgaaatacattttgcaaataaagccatataatcaagcctgtgaaacacaaagctcaggaaaggtaaaaagaaccacaaaattgttcaaggaagtgaatttcccactttcacagaatgagcaggacctggttgagcaggttcctccttcagtaaaacctctttaagggccagctgagaaaaaggaacgtcactcctgtaagatgtgttatttgccaaatacacggcctttaaaaactagtaatgttctgtgcaaagaccaacactagttactagagttgatacttttttaagccatattgttaaggagacataattatcatttgccctaaaatgggctgtaataagattcaggggctatattaaaccatattagattaagagattttcccgccaacttttttctctttatacatattatatctatagaaagaaccctaaatctgtgctacagaaatgctcacatatgtacaaggatatatgaataaggatgttcattacagaaacatttaattagcaaaaaataagaaaccaccaaagtatcaatcaatagagaatcattcaataaattatgaaatggtcacaatatggaatgctatatagcagttaaaaagaatgagttgaggatctatatgcaccaacttggatggctctctaaaatatatgaaagagaaaaaagtgtatttcagacaagtatacataatatgattccatttatgtagaaaaaatgaatatgtgattatgtacaatatataatatatatgtaagtgaacagaagagggtctggagaaagagattccagactgtagctacttctgagaaaggaaataacattgaggggaggaattaagtcacttcttaacctattttctttcatttagtaatttattcaacaaatatttagagttcctcctatgtacatgtaggtcctttcaagtcatagaaatataataatgaatagacaaagtccctgtccctctccaatgttccagccaaatgaacaacttttgctgggacagttctactcagcaaagcagcctatttcatctttgaacagcttaaattttcataagattggctttttaaatatatctattaaaccacaacctggatcctaataactgtcaaccagagatcctaaatttatccccttgaggccatacagagcacatctaatcccttcttcaagtgacagtccttcaaatattttaagaaagcaatcctgtcaccccctaaatcagactaaacacctccaggtcttccagctgttcttcctgtgacatcgtttcaagactttgcaccttcctgtatgcttctttctaaatgttctcctctttgtctagtttcctctaaaagctcagtgtcaagccatgatcatgatgctacaagggtcacctcgtcccaaaaacaaggggggaaagaaagacaatgatctgcctcatttttaacaactataccataccttaatcttattccccaccacaccaactaatcctctcctctgcacagttttatttgaaatgaattttgttacagaaagcaatgcttgcaagaagatacaaagcatctgacgcccttaggattttcctaaatgttagttttttaaagtgtttccatttacatgtctaataagacaacaaataccatttcataaaactaatttgaaatgtaaaactatgtcctgctgcagcccagtgagaataaggacgtcctgttcaccactgcatcctcagtggctagaacagtgcccaacgtgcaacagttgctcagtacatgttcaggagacgttggcttgtgcacgagtgaaataagcctcaaatcactcaactttaagtctgcatttgggcagaaggcaacaactaagtgaaatgaaagtcactcattaaaatatgcctagcatttgtgcagcaccataaggtgttcaggacttttacgtatactaactcattgatcaatgactctgtgaggtgaaaagaatgacaactggccaggcgcggtggctcacacctgtaatcctagcactttggaaggccaaggcgggcggatcatgaggtcaggagttcaagaccagcctgaccaacatggtgaaaccccgtctctactaaaaatacaaaaattagccgggcgtggtggcgggtgcctgtaatcccagctactcgggaggctgaggcaggagaatcgcttcaacccaggaggtggaggttgcagtgagctgagatcataccactgcactctagcctgggcgacagagcgagactctgtctcaaaaaaagacaaccgttcacctttctgacaggcaagaagagataacaatcatgaagtaaacagccagaacatcataccacgtggccagctaggatggcgctgccatgcaacacagcagtcctctaacttcttcccaggcatccttcacctcatcgcggcacctctgcctctctctgctcttcaagtaatgatgtttttaaaaagctgagagtaatgccgcatgtgtaaacccatcttctttcatattttcaaaaccctaggagagctccttgtttaaagcagggcccctcaccagcagcaatattttggatcaggtaattctctgttacgggtgtaatctcttgtaggatattagtagaatcccttccttctacccacttctacccctgccttctagacacctgtagcagccctccagctgtgacaaccaaaaatgtctccctacattgccaaatgttcctggggtatggccaaacctctaccagttaataatcaatgaattaaggccgggctcagtggcttatgcctgtaatcccaacactttggaaggccgagaccagcagattgcctgagctcaggagtttgagaccagcctgggaaacacagcaaaaacccacctctaccaaaaaaacaaaaaattaactgggagtggtggcgagcacctgtagtcccagctgctcgggaggctgaggcaggggaattgcttgaacctgggaggtggatcgtgccactgcactccagcctgggtgacagagcgagaccctgtctccgaaaaaaaaagcaaaaccaaaaaaaaaaaaaaaaagaattaaaggaatcctacagtaaatccattcacatggcagtagtaataatttaagagagcacagaaatatttcaggaacatgatttgctttccaggtacaaacaatatagccattagctcttaaaaatatatattcgagtttcagcaagttctccaagttcagaataggttactaaaagcatgctttacttctgtaaactcccaaagcaccaggatatagtctgtttacccacacctgctctcacatgtctctctcctctgatatccattctaggtgatgcctccaaaatgctcatccttttttgcctctcctaccttaacactagttcaagccctttactgggtacccagccttttagattcactctcaatcgctgagctactttcagcatctaacaaacaaagaaaaataaccaaccagagtgagaataaagggcacaagcagagcatgtctttcagagctgtgcaatccttttgagtcacagttgcaacccaggttgaatctacacaaatagacttagagcacttcggccttttcctttgaagagatagaagcccctgtccagacgtgctcgggaggtggagaaagatgttgggaaagggaaggagagatacacagcagtgtaacctaataacctcctttacccatggaagtaaaacactgttaacagttgaggggtggagggtccataaacatgaaatgatacacaaccagattctactcaacaggatggcaataaaaggagttaggaaaattctggaagttggtagttaaaaactaaatatttcacttaagttttctacagttgttaagccattgcaaaagggggatgaatgttagttattagcattttaaaaggttctacttcagcataaaggtcatttccaatcaatgggaggtccaatataattaaaaggtgcctaaattattattgaggaatcactttctttatgtcagaggaagtactgcaagccttttgagatttttttgttttgttttgttttgttttgttttgtttgagacagggtctcactctgtcaccaggctggagtgtagtggcacgatctcagctcactgcaaactctgccaccctggttcaagcaattctcctgcctcagcctcccaagtagctgggattatagacatgcgccaccacgcccggctaatttttgtatttttcgtagagatggggtttcaccatgttggtcaggcttgtctcgaactcctgacctcgtgatctgcccgctcggcctcccaaagtgctgggattacatgcatgagccactgcgcctggccttttttttcttttttcttttttttttttgagaaggatttttactcttgttgcccaggctggagtgcaatggcacaatctcggctcactgcaacctccacctcccaggttcaagcaattcccctgcctcagcctctcaagtagctgggattacaggcgtgtgccaccatccccagctaatttttgtattttagtagagacggggtttcaccatgttggtcaggctggtctcaaactcctgatctcaactgatctaccggtctcggcctcccatagtgctgggattacaggtatgagccactgtgcccggccaccttttgagattttttaattaaatttctccaagaatagtatacacagcttgccatagtagtaacttcctgctcctatccatgcgtgcatgcggccctcagagaacgccgaatgctgtgcttctgtcccaaatggagaaaggaactcaaaaacccctccactgtttaacagatggaattgccaagtagactttaaaaaaagtgtgctccttctctgatccactgaatggaaccccatgatctttaagtatttattatacagcaggccctcaactccattttctgcataattttatctaaccctatttcttttgttctttaaactttcttagatttaaacaacaaaaaaattaaactaaattaatcagttcttggtgacagctgatttttcagaagctacatttccaagtcacaaaactaaatagtgaatttttggaatctgtctggaaagcaggctgtatttgtaataaaaatttaatttgtggggggatactgtaattttggagcagtcatctgcaaattaacttatttggcagataccaatgtcaaattggtatgaaacaacaggaaagtaaagcatattataatattttccttaaaaatcatggaaaggtgatataacaccctgaagcctgaaactgctgtcgttagtgccaatgactatactgatttttaaaaatctggccgggtgcggtggctcacacctgtaatcccagcactttgggaggctgaggtgggcagatcacaaggtcaggagatcgacaccatcctggccaacatggtgaaacctgtctctactaaaatacaaaaaattagccaggcgtggtggtacatgcctgtagtctcagctactcgggaggctgaggcaggggaatcacttgaacccaggaggcagagcttgcagtgagccgagattgcatcacttcactccagcctgacggcagagtgagactccatctcaaaaaaaaaaaaaaaaaaaaaaaaaattgttacgcccttgaatctggctagaataatactgaaaatctacagagaatatatattgtcaaagtcttggatgcaagagcgtgatttagtatcttaacttccatgaaacactatggacaatgtaccaatgctgctgaatgaatgaatgaaattagaaactcagtctttattatttgtgctaagtaagaataaaggcaaatccatactaaatccaaaatggtattgtatctgattgtttcattagttctgagagtcaggagcaccaaaattaaattttttctcttcttattgcttcttcccactctttgataacggtgttaaagatcactgaaaagaccaaaaggttggcagcaggtggggggaaggaaaaacaaagcaagcagccaggggatctgaaaactcaaccatcagcctttgaataatagagtgaaaaatgtaaagctatttgggagacttaaaaggtagacactatgaaaatcttgacagtgagttttaaatatgttcctctttataagagtctgatgtctgtttgattgatttcacagttctccaagatgggtaatgtggaaaaagacaacagaatttagcctttttaagctcaagagtataagacaggactgttacttaacaaacagggaacagtaatcacacaagtacttcaaatatatccaagaattactatttaacatgcaaaacaggttcttacactggatcccttctatgacactcacaccagggtgagtgagtgaatgagtgaatgtgtgtgtgtgtgtgtgcacgtgcatgcatgagagagagaaatgccttatattcctatctcaaccaaatgggcaggaaaacttctttaacaacagttggccattagtctcacagcgatattcagaaaataactccatataactctattttactattaaattcctcatccttcttcttccagagatgtcagtaaactatgtacaggactgcccatttttctcctatcaggtggcagaaatcctaaaaaagattctaaagtttgcccttataattctaatgagacaggatagaaagtatcaagcatactagcttcctgaaaacttggctttccctgggaaggaactcagcttgaagagcattttgtagattatgattaatgcttaactaactctgcttctacttttctgaccactggctgcccagtactaaataaaatataccacaaccaaataacataatagaattaaacatgtattggagcttaaaaaaatgcttcttgagaattaaaagaaaaaaatacatatgaaggacagaaaaaacaaaatttcaaaaagttttccacaaacttaaggcatgctgtgttgggcaatggaaagctttccgaaagacagtctgtcctgttacccatgctagcggcagaacaggataagccaaagaaaaggttatcatagggaagatgtagaaatagcttggtaatacgagcttgccaaaaaaattgatacagagccagtaatttaccttcaacagggtaagaaatgggaagccagattaacgtataaggacattcagcagtggactaatatgttgacatttcctgaatctattccaggaatggatggaacattttggatgggttgtagttgtctccaatactcggtaataacgcatttattattaaatgcatgttatgaattttttgtgataagctcttcagaacaggggtcacatagatttatgcagtctgtaagctgtatataaattaagcacactctgaaagttacgatggtgctaatacagtgaagaggtcatgaaaataatatggtcttatctaagtcaactaagactatcaccattttaaaattttgaaaactgtgcactgtcatgctttttgatgtgcctgctcagcttgaaaatgtacttgtcaattgaaatttgccttaaaattttaaccaggacctcagttccaaatacagcaaataaacaatgcccccttttgttaccacaaataattaaaagccatcttttcaactgaggctctctgataggtgaagtcaataattttcaccaagtctttgaggggaagaaaaaaactatgtcaataaagtggtggtggttgggatgggatcatttgactacatgttcagaacggacctaatacctgaggtagtgcagcttcaaacccaggtctgtgccacctgctctatcaacagggctggtgaggactcacacagaacccagccccctctgtggcagcctggagccaaggaaaattttttacccctcacccactctgctttttgtttgctatttttttgttgttgtttttcatgcccattcttgtaaatgtgtaagataggaaaacaaatcaaaagaggcaaagccctcattagactgccttcttaatccaagcgaggcagaaagataattaatcgatatttagtacttcggacatattggtccttagaaagtaaacaataccaatgaaacagtaaagaatcctattcatctttatttttatatcaccgttattattatttggttgtgggtgatcattgtttttctttagggctttccaaatagagcgcccaatctgagaactacatttaattgttctgtgcctcactggagtacaactataatcctgcagtcaattcaagaaaatgaagagcaacgttttctttacaacctctatttttgagattttacctcaatacagactgttaaaatactctcagaagccaaggttaacttttaaactaattattttaaaaggaaatataacttgtagagcatgtttctttcttttttttttttttttttggtacacagaatttacttgcaactctgcttaagagttaaggcttacattacattcatcacactcatcacacataccagtgagagatgcatgtgaaacagctgaagctaaaatacactcctattctgtacacagccctggcatttattagtgcgtaagtctaatcaacaggctaaatcattgtcataaaatgacagaaaattttattttcacgcagtcatctttcaagtctatttgttgctaatttgctaaactgggattcactatgaaatctacagctgatgtctctgtctattgaagcaagcattatctttctattttcaaaagtaagctgtggcttgggcttgctgtcttcttcccagtaaggtcaggaggctgggcttgcttccacctgcgagtgtatcacaaaccaggcgcgcgcacccgagccctccctccaccagggcggaaaccagagaacacaacccaaacaccgaaagtttctggtcgcaaactctactcatcttgccgtgtccagagacccggcactgggaacggcactggcttttgttccagggtcccccagctggcgaggtaaacgccacagcagtccttgatccccaaaggttgtgagagattctgtggcacgggaattttggagcctcccgaaaggagcccatttctccgcaatccatgcgcgtggggtgtacaaatacacgaaaagaggacgcggggtgggcaggcatgaaaccttcagtgcctcttaaattctcagtctcaggttcacaaagtgaatctcctcctccgtggaagggcgctaggggggcgggggctgggagagaaataggttggagaaagggaccggagctacagtcgagatgcgggaccggccccgcctccggctacaatcagaaaaactacagtgtgtcagtggttttcggtttcctgtttgtaaagcgagaacctcccccgactcgaactgtcgttcttcctcaaaaccaaccgagacggccccttcttcgcgctcggggcaggctcagccgcagggggagcggagaggagggacgcgggggcatggggggcgcggcggggcggggacagccgcgatgaagcgggcagggccacggggcgcagcacccctcccagcccagcggccccggggtctgagctgggccgcgaggcggacaaagcgcctcccgctccctcccccacggccacgttccaaaagggaggaagaaggcgggcaagagtggctggaggaggaggaagggaggaggaaggggagggggaggaggaagaggaggagggaaggtgctgccggcgggactgggcaggatcgcgccgacctgggaggggagggaggaggggttgagcgcccccggagaactgggaggagggaaggattcttgaagcccaagataaacaaattgttcctcttcacgtgcggggtggggggacgtggggagcgagcactgcggcgtcgcctcccctcccccaagccgactctttgtcaccgagcgccggcccgagcccccggcgaaagcccacggcagcactggcaccaccccggcgccggggactcacagaccgggaacgtgtgcgatttctaaaccgcacgacgggagggccgcccctgccgggctctgcgccgccgatcgctgggcggtctgcacgggaaacaggcgaaggcgcgcggccccggcacgctccaggattcccgtcgcctggcccacccagcacccgggcggcgcggtgcggggggggggggcacacacctttcccaagcttccggcctcccctcacccagaaaggaaagcaaaagaaccggagaggggagataagagaaaggattctagcctccggcttggggggtgggaactgccccttcctcctggagaagttaagccattggctgctcatcctacctcgaacccgcccacccagccatttaagcctcttttacctccctgctaccttccattgctctgggcttattaagcaggcccccaaagttggcgggcagcggggcagggggcgccaagcggagaaagactccgtgcacgcaagtttaaaaggaaaaaaggaaagaatcccaagcgaagttgtgtggtggggcctcttggcgcaaaccctgggtattgctttcccctcccgccccctccaggccgctcccctcttaaccctcccagccgctccacctgccgggctagccccgagtcgcgagcaaagagcggagcgcacccgcgccccgcatccgcgcgcgctcccgcgagcacccccgcgcgcagccaccctcgctcgtttctcacccacttcaaagttcattcacaaaactctcagactttctcagcccaaagggggtgagctggggagaggaggcgagaggctctccttccccgcttcccccctaggggttgagggcctggtgcccgcccagaacctgcgacagcatcaatatttccacgcacccggcggatgtgctgagaggggtgggcgtagggggacgggtctggggaggcgaggcggcgcggctagaggtggggtggggagcggcgaagaggaggagcaaggtttcaactcaggggttcactctttcaaatcggtatcttaagaaagggaaggggggaaacttttccagcacctcactccgacgctcctctaggctccctccgcccctcgcagtcgtgactggcttctcccctctcgccccctcctccccaaatctgacaaccctgacagattaacaggtagcgacgacggcagctttttccctaagaaaagttgacgttaacccttaggcttcagcccacctcacccaccgtgcaaatcagacccttgtacccccatgtaagaagctccacgcgccccccaccaccaccaccacccccaacgcgcgccgcaagcccgctgcccgtgcgccctcaccatgatcagcgtgtggttcctctgctccgccgaggcagcctccgcatcttgctggggtttgctcgggtgctgctgtttgccggtgccggcgcccgatttcttggccctctgctccagggtccgctggtagaggctcacggtgtcccggcgctccagctccagctgctccacctgagcctgctggtacctgttctcgcagttgacgtggtgccgacggcagccctcgatgcgctggcggagccgctccaccacggtgctgtgcttgggaacggccgccgaaccgccgccggggcccccggagccgccgcatccaccggctgccgggtgattgctactcggagcagcgggagtactattgggagtattattcacaccgatcccggccccgccgaggctgctgttcaggctactgttgatgcaaatactactgccattcgcggcagcagcgggggctgcgaaatcccccatcctgctccccgggcacactattttggaagaactttttttatccacccccctatcagcctcctccttgggtccaaggattaaaatagtttaagtggaacgcgggggagacgcaagcacatggatggaaacggcgatcccgacggggcgaaaaaaacggggggggagattttggggtggtttttgtttcctttttttaaactgtaaaagctcaaggggaagaaaaggggggaacgttatcggaataccatcagacacctatcaacaaaaagaatcacaacaaactgagccagcagcaaatcgggttgcaactcaaggggagatccgctccttgcttgccttctttttataatccattattttctaataaattccaggagatttccggtggttggcaagcattttctccctacataccgaaaaacacaccccatgtacacacacaagcatatgcctccagtgcggacacgcgcgacacacactcactccacaccgcatcggaaaacggcaagcttgcttattgcattttccttccacaaaaaagttttggtgtttatgccgccccgtgttctcaaagtactttggctgctcagttgcatttcacaggaacctagatatcgaatcctcgggctgggggaagtaaacacatggacagtccgaggcgactgcaaaagtagatcggtgaagtcctttgcaaaacgccgcgcagagagcagcacctaacgctcggctgggctgccgctgccgccgctgctcctgccaccatcacaatgatcaactgctcgccgccgccgccgccgccgcctcctcctcctcctctcgctcctccacctcctcctcctcctccatgccagcggagtgatatcaggacgcgcgagctcagtaaacacggcagcggcggcggctggaggccgtgagacaggcccgcggacacggcgcaaaacccggcccggactctcacccggcaggagcgggcgcggcacgcaccagcacccggctcccgtctccgtcgcctcggcgcccggcgcccctcctacgcccccaaccacactaccgccccgccgagaagcccagagccgtcggcgacggagagaagaaagattctggggggatctcagaaataaatcaacttttgacctgtgtgtgtgcgtgagagcgtgtgtgagtgtgtgtgtctgtgtatgcgcgcgcgcgtgcgcggggacgcgcctggtagggtttccttattccaaggaaagtatcaagcgatcccaagttgttgttatacatttatgcattatattgcagaactgtgcatgaccaggcagaaacattgaagctttacagcagttgtctgtcatccctatccatgtggaaagaaaaaggcaaatgagtgacttgtttttaaaacccaggtaataagtctgcgctagtaacagcgctacttacggacacttgttccaagtctaggccagactgaacacacaaataccaaattctaaataaatagaaataggcatcaaaaatgtgtaatatttaactcactgtacataatgattgttgttactaagtcaattattgttttacttacccttggaaaaaaataaagcaagcagggacttggaggtgagactaacagtacatttaaacagactgttttgaacactaggtgctaatgacagcagtaattaaggtccttcgtaaatcaagtggaaagattgcagatttcatagactagaactatagaaaaaacacagcatttcacagtttgtcatgaccaaaacaaaaacaagcaaaaataacaggcctactttattgctggatatatttctttccatttcaatgaattcacaataagtacaattaaaatggactagcaactgcagaaatcaatctaaactttccattttattaaagcacattatctttcccgatattatctaaaaacaaaaataacaactaaggatcaaatattcttgaatatggacttaaaccattgcatatacatatttttaaaaattaagatggagaaattattatttctctaataatcagtaaactataaatcttgattgtgagatgttaattataagtcattttgtattatttcaataaatcttaagaattagtttttagggtaaaaatacaccccagttttctaaaatagccaggaataaaagaactttggatcttatgcattagtcatgagatctgatttaaaccatcttcatttcttggcattgcagattagcacaggatgctatttctaacctcat

SEQ ID NO: 352 - DNA, 33583 bp, Homo sapiens
  source 1..33583: mol_type = genomic DNA
tgtttccactcctgaactcatgaaacgctttcagagaccttattgtccccatgggataggtaaactgaggcacagagctgctcagtgacttctttaaggtcatccagctagtaagtggaggaattggtattggaacccatacctatctgagccccagactcatgattttccatcccactgcctgggaagggtgaacaggagacgcaggaagagaatggtgatggctgcaaggcttccctcttatctcctgtggctccccactctgtgcatggggccctgcatcacccccactttacacctgggcaagcagaggtcaggcccggcctcaagcctttctagcaggtggtggaatctgcttccctcacgtgaggtccctgacagggtacacatgtctgcctggaggccaggggctgaccccttgacctttgcctggtacattctgccttcactagccctggctttacatccagagtcatctgttcccagcgccagattggtcagcggttcctgaaatcccccgaggttccgtgtgggagcagagggaggactggcccatccagccattatgcagatgggcagactgagatcctaggaggagaggagagaacgaaggtccaggagagagccaggatggggcctcggggctcgcgggataaaatgcaccgcatgccgcctcactccctctgagacacggtttccccctgtgtagaacaggggcagcagtaaccagccacgaaaactcctcgtgctgcctcgtcaccgggcatcgctgagctcaccaccgaccccgcgccctggccgggcgcctggagcgcgggcgcgggcgacgtttgctggcgccaggccctcagtgcgtgttagcgagcagcgccgggagatagctgtcaccgccgcccgctcacagatgcgtagactgaggctcaggtgtcaccacctgaccaaggctagttccgctacaaagctgccgactcggatccgaacccgggtccaatttacagaaaaggaaactgaggcccagagacactagggagcttgctagggtgaggcagctgcaggttcagagagccaggaggcagcccagcagcgcacttttaacccccgcccacttcggcaggcccagccgtgccacctttagggatctcgggttttttccagacgacgcacccaggagaacgcgcccgcgcatcgcacccgccggggctgcgggtctgggggtgccgggctgggcctgggcgcctgcagggagcagcgggctcagtgggtcccgggagtgggtggggcttgcatgttgacgggcagcgcgaggggcgcggctttagtccagggggcggagcctgaccggacctgggtttttcgggcggctggcggacttgacagagagcgggaggggcccggatcctgggcctaaggagggtggggcgtgtgcttgacaggcagggacaggccggcgtctgataggcagaggacgggccttggaaacgaaaggaccaatcgggcacgcaggggcggggcctgagtcagcgcagttcggccggggtctccccggcgctgcccagtctgtctccggcgccgcccgtcgcggactcgtccttgctgcagtcgccgccgcagtcctcgccgcagtcgccgccgccgccgccgccgccgccgctgctcctccgcctggcctgggccgtctgcccgcagccatgagcgtgctcggccccggtggagcccgcagtcctctagattagtctccaccgccgtccaggacccacttgcagcatggagtcgcccgcctcgagccagcccgccagcatgccccagtccaaaggtaggcgctcccggccgggacctcggcctgaccccgcgcctaatctggggccgggctgcaaaccccgacctttctttggtcccaccccatcctgttctcgacctggcagcggcgtccggtcccggaaccccttcctgttcggggtcccgggaccagcccccgcctgggccctcacctggacccccacgttaggccttgggactgcactcaggcccgagatcacccaggctggacccagactaggactttgttctgctcaccccatccaagtcaggagcctcattctgacctcatttgggccttatggctgcagcctggacatgaactctcccagtcttctccctcagcgggacccaggtgagattcacactggccttcacctgggtccttgggcagcacccagtcccatttctagcttcgggtcccagggctgtatccaggttgggatttaacttgagtctccatctgggccccagagtgctcctgttgttgcggacctcactgtaccccctatgcgggtgctctggctacaccccagctcggaactccccgtccttctctcccccagctcttcttatccttataggccctatgttgccccttccctggctggcctgcaccctgtcctgcagccctgggctcccaggaaccttccttgtcctcccacccctccctaaggtacagccccctctctaccggcctctctctgtcttgagttgcaagcttctccctgcactgggggttctcaccccatcttattcttgtcctggctgcctgggatctgggccagccgccaggccagggtgctggctgtgcaagggatttgctcttctccaagtagctggccttcctggaaatttttgtgaggtggcagcagcaggatttgtcatgcggagggggaaggatgaaactcggagggcaaaaggggaattttttttttttcaggaagaggaaaggatgtttttggtgcgtcggagtttcagtaggctgggttgtgcgagagatttccaaaccggacatagccgtaatgaatgggctgcctcctggctttctgaacctgcagctgcttcaccccagcaagctccctggtgtctctgggcctcagtttccttttctgtaaattggaagtaatcgcacctgcttctgtggacgtgggagtgtggtgtggggtggtgaatagtaaagagctctgaggcgttctctcagcgtagcacctggcgcagagccggtgctcaccagggtacactggctgcacacatctcgctattgtttccattcttcttgctggaaaggcctccactgctggaagtgcagcctcagagtgagcaggaggaagcacctagcagcgggcacctagtgggcacttcatcaggggtcagccgctcttctgttctggagggtgcaggccaatgggagccctatgtgggcctggggagggcatgggctcttcctggcccctgctgctggctgctatggtggctggagccgggtgggctggataattatgccttacataagtgggaggccggatccctgaccattgcccaaccactgtgagtaactcgggaggcactcgacgggggaggtgtctggggagggacttgcactgcacagacctcgtggagcttgggaaccaggaaatcagacacttctccactctggagagctcggggaagggtaggaagcactgtttgttttggaggctttttagctctccaggcagagaatgcctcatcaaaataaaagttccagttgcagagttgtgaaaggagaggggtcatagatgcagtgagaatgctgtgagagggccaaaatgaacttctagatgtggacccaggtcctagatgaggttgagggggctggatggagggtcagggacctccctcaggcccagggactctgtagtctctttggggtctggggaaggatgtggtggcagagccacaatgcccttcaccaaaaaccctatgagctccttctttttttccatgtgccatgcattttctcatttattcctcatagccccatttactgataaggaaactgaggcgttaagtgccttgcctgaggccacacagctgtgacaggcggagctagggttccccctaggactgtgtttccacagtggccttccccgtgctcccctatgtgcccctcccatgctggatgcctgagctgagctggtggggtgcccccacccctggccttgctcagagcatgtgcagtgggcctgtcctcatggccacgtcagacctagaggacagactgaggcagaggtgatgcctctcctgtgcacagcgctttacactgggcctgttgcattctcgctgcaaaatcccactcatttgacagatgcagaactcagcttggatggaggagtggccggactgcccccataggtggagagcctcactctgtgcccaccccatcctgggcactgggcctcccagcactgatcccttctccaccttctcaaaggaatttgaacaaagcagggagtggctggcgcttgaccttactggagctttacctttgagcttcctgcctggcagcaggtgccctgcactgtttccatgccatgggcctggggagttttctatgagtgtgtgaggccctcaggcccacagctctgctggttttcccctggcctccttgcccacatggccatctctggctggggttagaggccaagtggctggcgctggggccagtgggtgggggcatgtgtgcaagccacatttgtccttggagggtaccacacgtgtcctgttgtcgttcagaacatgggttctgccccttctgccctaagagtgccacctgtgggagcacttcatggctaatcttcacacagcttggactgtggctgtaggactcctgactgcccgatggtgacactgaggtttcatagagcactgttgtatcctagccctgcctgctgtggccacccccccaacccctggctgtcggaaagactggaggtggcacctcggggacttcccccacccctcttgtgacgcacaggaaactctctgtcagccaacccatggcccagcgcccaaagggagcaaagttctcagttggcccgtgtgaggagaaggccggggcagcggaggcttccggcggtgagtcagcgggcactgggtgctgactcacccgctgggcatgccagccggctgcctacagcttaaaggggcgatgcctgccagcctggtgggtggggagggggttacgtgtcctgcaggtggcacctagccctgagctggggcactggaggtggccccttcctgggcctcggactgggctgggaacccctgggcaggccctctgtgccccacccaggaacttcctctattaggcaaggggctctgcttcctcttgctcacagagcaggagcaggtggcagtgactgtttaccacccttggcccaggggacacctcaggttcagctgtgcagctgggactcagggagggtgaggagcagaggtggtgcagggtcggctggggtgggacccggcctgagctcctggaagatggtgatgtggagaggctaagacctcagtttccagagcctgactgcctgggtccaaaccccagctctgtcccttttgcgatgtgacgtgggacaagttgcatctggtccactctctgcactctgtaaatgatttctgtcccctgggcatggcccagctctcagaggagaagcttccatttcctcatctgcagactgagaatggggaccctgcttgtctggatgtagacagttccattccacacttgctaagtgtcaggcacaagtcatagtgagactgccctctgcctgcagagaacccagccgaggcatgcctctgtcaggcaggaagccgggggtcctgggctctgctgggatggccctgggttcgaatcctggctccactacttccttacctgggcaagtcttgtgccctctttagccctcagtctcctcttctgtaaagtgggagtaaacatgctcccttgcagggtagtggtcgagattgaagatagcatttgttaagtgaatggcacctgttattattttattattgttacttttgtgggtgtagttcattggtaggtggataaacagtagcagggcttcgtgacaatgtgctcgtaggcgctgtgacatgaggcctcttggctgtagggtcctttcacgcaggccagaatttaccaggctttagggcctcttaacccactggtccccaacgtggggctggggactgcccctggcctcctgggcctcccttgggagggtgagtggggaacagagagctggggcctgctcctgcaggcctgccctgcccctggctttggcatgcagcattaacaggacgaatatggggaaggtggggtgggactgggaattagaactcaggcccctgggccagcccgggaagcaagagggcctggggtcatggttctaggggctcagtcctgagtcaggggtgttggggggtggtgggccaagctgaggggagcaactgggtgccagtgtcttgggagggtcccagaggagggctgctgggcagcagcatggaggacacagcattgtggcagggccccacgactgatgcccacatgccgtccacgcctgcccttgtccgcgcctcctggcgctgcccacctccatcaggcctgtgtgcccagtggcttctgcagatgcctccccgaagcagtggccctggaaacctcaaacagcctcttgccaggggcatgaaggccatacagggccaggggaggcagaagcagtttgttgggccccttgcagcttccagataccaagcctgactgcggcagctccagagagggccccagactttcttcccctgaccccagtcctgggcacatgtccttgtcacctccctgccctgcactccagggccaccttccctggtttctctggggaggccatgtccagctgtccctctcccagctggtcccctgcccagggtggccggcaccacctcctgccatgtggcccatggccgggattgcacctggctctgctgacacctcctggcggctatatcgagtgccctgactgtccttgcctgcatcactgtgctgatgcccccaagggcttccaaggcccgtcccaaggtttacatgtgccagtgtgtgcggtgatgcggtgacaggccagggggctgcctcactggggcagggctgcgaggggctgtggatgccagcggtgtgttcagacctaatcaggaggtgtgtgggggctggggagcactgctgcctgggagggttgctttggcggtgtcagttggcagctgaggcacacgttggaggcctgcccaggacggctctgggtatggggatggagacagctcccatccccttgtcattctgctcttgcctggcttagccttctggtcaacccatagcctcctgccgttggcatggcacacggcatcccggatggctggggcagaccccagggtggcgcgggcagacactcgttgggaaagtctgcagggacttccaggtggcagggctggttctaggccagctccctacctacctctcagggctgctgttgagggtgaatgagacctggcaagtccagggagcccctaggtaccagacagcactgaatttgaacctgatgtctgtgctagcatttccatcaccaagaaccccgtttttggtatgtctcatcatcaatcccatgctttgtaagattttaatagtaatgataaatcccagcctttgggaggccgagacaggaggatcatttgagggcaggagttcacaaccagcctgggcaacatagggagagctcatctctacaaaaaacataaaagattagctgggcatggtggcacacgtctgtagtctcagctactcaggaggcagaggtgggaggatcgtttgtgcctgggaggttgaggctgcaatgagtgccacagcactccagcctgggtgacagagtgagaccctgtctgtttaaaaaaaatagaagtaggccaggcacggtggctcacgcctgtaatcccagcactttgggaggccgaggcgggtggatcatgaggtcaggagctcgagaccatcctgtctaacacggtaaaaccccgtctctactaaaaacacacaaaaaattaaccgggcgtggtggcaggtgtctgtagtcccagctactcgggaggctgaggcaggagaatggcatgaacccgggaggcggagcttgcagtgagccgggatcgcaccactgcactccagcctgggcaatagagagagaatcgtctcaaaaataaatacaatacaatcaatacaatagaatacaatacaatagaatacaatacaatagaatacaatacaatagaatacaatagaatacagtacaatacaatacaacacaacacaacacaacacaacacaacacgtagtgataacagtgaagcacagatggcgtttgttcaggtttgttttccgttctgcaggagcagcagcactggcctgtcgacagtgcaggtggctggcaatggccttgctgacctcgagccgggcccacgtggggacctttggagcacagcctacgatcctggtgcaaggaatgtcccattcttctgatgctctgggagggctgagcatcacttgtgggtccccctgccctgtcatggcctcttaaagcctgagcatggggcctgccccacagtgtgggagcctggggccagagtcccaccgatctgaccccttttgtgctggggattttgtgtgcatggacttgtttggtcttcacggctacccagcaacctgggtgtgttgtcatcaaccccatcttaggagtgagtaaactgaggcctggtgggatagtgacctgctcaaggtcacgaaggactgtcctgggagcatggctttgtctttacaactccggacccttgctcatcctttcccagaggtcatggccccttcacccgttcataggacgtcaaaggaggaaaccgaggcttgcacagagagggagtgtggctcgcccccaggctggcacgggccgacgctgtggtggtttctccactgaggtgcggggaaggcaggagctgggacccaggctgggggcctgactctgctgctgccctggtgcgtcacctcaggcgtgtcctggggcccctggtgtcagcatctgcactggacagtctctggggcaccctccagcctgagcagcctgctgcgggggctgtactgtgctcagtgagcctggctgccccttcagacagaggagagtgctggggctggcttcaagcaggcctctttgtttcttcttttctttaaattgcctgcacttgagtagcctttatcacacagtgcaggaatctcaaagggacaaaaaggcagtctcttgtttctcctcggaatactctgcacactccagcattttctttccttcttcttctcattttttttttttgagacagtgtcttgctctgttgcccagtggcacagtcatggctcaccacagctcagacgatcctcccacctcagcctcccaggtaactgggactacaggcacgcaccaccacgcccactacatttttgttttgttttattttttgtagagacaggattttgtcatgttgcccaggctagtattgaactcctgagctcaaggaatccacccaccttggcctcccaaagtgctgggattacaggcatgtgctaatttttgtatttttagtagagacagggtttcaccatgttggccaggctggtctcaaactcctgacctcaagtaatccttctgccttggcctcccaaagtgctgggattacaggcgtgagccacctcacatggtctgaccggcattttctttctcacactgctgtactcctgctgctcttggctcttcctgtccctgggaggccactcctcgcatcctgctgaggacctgcaggatcctcaccaattccatgtgccagccttttgattctataaaccctgggcctcagtttccccatctgcagcatggagatcacattagtacctgcctcaaggggttgctgagaggatcaaatgagatgtaatgaaagaaatttgcataggccaggcacgcagaggacaccccaggacaccccagcacatagtaggtattcactaaatgttagtgggtgttgtagtgtgggggtaagctgctcaacgtggaatttctggatgcagaagaatgggcattttgatggccatggggcatggaggacccagaccggtgaggtctggccatgggaggccaggctgcaccctgatgcccgcagccacctgctgtgggccccctgtctttcacgtgccttgtgccccagccactctgcccggggtcctcccgtgttgcctccttccctctccagcgaggcccgtgcctctggcccttccctacgtccttccctccaaagcacaagtggttccatgttgcaggcgggccatggttgtctctgctgggctgttggcattgggcgggaggaccctctggcagccatggttgcccctgtgcagctgagcatctggcctccccaccggatgttaggggtgctcccgagccatgctggtccggagcatcaccggggagggggcgctgccaggtggatagtctggggatcccccgttctctgcaggtgaggaagtccctgtagggtagagaggtggggagggtgtgaggccctggaggccaggccctggccaggtggccttgcacagccgggcagaggcagggcagggctgtggagggcagagccttggtcactcctcctcaccctagcctgctgcacacctacaaggtgaggatagagaaggtagggcctgcagtggccgtgtatgaggccagatggcacagcctgggcctggcatggagcaggcacttggttagatgggagaaccttccccttgtcctgcatcctctccagagcccaggacaggggccccagaacctcagggcaaggggccctgcctgaaggtgcatggccaccccctgctgcccacaggtgcttggcagtggcgtctgcagtacctcaggacctctgatggcacctgtcctggggagaggggccagtgtctggcaggtcgcagccaaacacatccatccacaccgtcgaggtacatctgcccacgcaaaagcctgtgcccacttctcggggcctcagtttcccccgtgccatggagcgcattggccttgttgctgtccctctgagggaccctggggaatagaggtggcctggggcagggcggcgcctcttgctgctcacatctcccagcccttgtggctccttccctggcaggcccagaacttctgcagtagaacagggacctcctggaacatccggaagtcaggtgagggcagtgaactaggagcagggattacttctgttgtcagaaacctggtgatgctcctgcatgtggcatggtgtggggctgactttatgagtggaggcggagcaggggctgcaaggaggggttgtcatcttgcccctgtgggtgacccttagagggtcacacagcttggtctccccaggcccagggtagagggagcagccgaagtgggggccctgccctcaggctgttgctgtttggacgttggagccagacagacctgcctttatggccactcctcaccagacgcccaccgtgtggcctctctaagtcacctcttctcccgcatgcttgatacaacagataagtgaacctcccctactcccttgtggagtcactgagagggtggacaggggtggtctggggctgagggtggtgttctcttgggagctgtgcacttccagatggccccatctaatctccacgcgccaggcactgctatggcatgacgctgataacccggggaggtttgtctgtaatctccactttacatatgtccagagaggtgaagccacttgcctgagggcacacagctaggaaggggcagagttgcagttgagcccaggccttggctccagagtgagtgctcacaggtgacctgctgactggctctctgagatggtaactgcagaacggccacctgtgggactccacagcagagaagccatcaggccacagggagagccggtcactggggcctgcgcagtcaggcagcctctctgaactggtgaaaggcaagacgacgtagtagctaggacagtcacagggaagagcatttcaggcagagggaagggcatgtgtgaaggccctgcggtgggaaagcaggtgtctcattcagagaagggctcactcaagggtcgggggctctagttgggggtgagtgggaggagatagggcagagctgccacggccagtgagagttgtgttctagtctgggggtgcctctctttacctgtggtgtagcctcaggtcagtggctgaattctggtcagtttcagtttccttgcccctgcctgggggctgctatgaggctggagtatgtggaggacaccccaggacaccccgtgctgagagccgggacaggcgggcttatcgtgggttgccagtggccgccgagagcctctgtttgttgtggtgatggttgccacaacggctgcacctgggcagccctgggctgcctggccatctgggcccagctctgacgtctgcagcagcctgaggcctgtttctaggctgtctccatgacggcctcacccactccctctgacagctgggtggcttccccatggagcctgtggccctcctgatgcaggcttggtgtccccaacaggccggtggatgcagaggccagtccatataccacccaggcctgcgaggagcgtggtccccacccatccagcccatatgtgcaagtgcccttgacaggtggggaaactgaggcttggtgaagggggggccacatgatacaacattcccaaatcccaaggcatgaggtgggtggcaggctggggccagagggaccaagagcagagagagtgcagggagggtgtggcgtggaccccacagggaaagggtgggactcaaggggctgggggcaaggtcaaggcccagggtctctgtgcagagctttaatttttaacagaaaatattttatattctggttacgaaaagcctgacatcaggaataaaagctacctataattctcattacttagggcagttttttttttcacctctgcagagaggctggtcatatccatggtgaccatttatgggccacaacaggtccccatctgcgcagtgaaccctgtgctgagcaccttgcagacgtgatcttgcttcgtcctgcagcactgtgcggggcaggtgggtggcatttctgcctcgagctgttttgtacatgaggaacccaaggtgcagaggagggcaccatgccagggtcgcagagctggagtttaccacggctgcgccactccaagcccagagcctcagaagttcagagactttggcccagaggcaggatagaagtggcctcagaagctgctggccctgtgtgccatggtttttcctgttagaatgtgctgagcctctgcatctccagactctgttgccgtttcttgttgagcacgagacttgggcccctccttccgcctcagggagggctccctgtggcaggggtgctgtgagccatggcctggcctgttggggtctgcgagtcaataaactcaggagtgactcctggccagacccctgacttgctgtgcagcctggggcaagtggcttcacctctctgagcctgttccccaagtaaagtgaggttgggagcccctccctgtagggctgtgggagtatctggagtcacagatgagaagggccctgcctgtggccggtgctgtggctgtgacagactcgcagtgagacccatgcggtccctgacagccagggtgttgctgcatcttaaaatgagataaaaacgctgcgcacaggagtagtgactaggcgattgattcatggggtgagcagttagcaggcaggcacccagtgcatgtggcggcagctgctgctgctgctgctgctgctgcttctgtctgtggacgctgttgtttcctgaagcctctggggcctggcagcggggtccccggggtggctttggtggaaaggctgcaggtatctgcttgcctggctcctgcactctgcccacctgccccaggatggaccctgggacccctgtccctgccaaggctattctgtttcctgttgttctggccttgtcttcccagtagcggtaaccacccttcgccctccatctgggctgggttggctgctgggccccggtgcgtggctctgagatggggccacaagtctgtgttgcaccgtggccaaggctggatctgaacctggcttggaggcggcttcagagactggggtcttcttggcaggcggcagcagggccatgggcagtttctaagccccagtaccagcagccagggtgagccagcagcagggagtggcgggtggtgggtgagggccaagatgtggcaggatcatgcttgggaaatgatgaggcagaagctcccacaagggcaggcatgtggccagcatgtctgtactgggtggtctccgggagccgtgtcactcccagccctgctgcctgatggtgccagagcaccaggtgaccctggcatctctgatccttgcttctcctgcctgtggaatggcggctatgccttattcaaagggcggccctgactacagggagctctctctgcatgccagccccactgtgcctggagccccagaaatgctgaccctccgttagtaccagctgagtgctgtgcacctggccaggctcttgtagccagcctgagaggtgtggacactggggcctctcgcctgtccctaggggtggagtgaggaaggtactgccccgggactctggcctgcctggtgcaggggaggggagagagccagcgcttttcaggggagggagagaaacgggcatcgggtgtcggcctccagggtgagcagggcccagcagagctagcctggagggcagcccgggctggagtccccgcctgctccaccgcctgttgccctttctgggggcctggccttcctcatcttggatgcagtatgagccccatcctgctacctgcagctaatgaagcccctgtacagtggctgctgcaggtgctggctggacccccgctgggccccttctcaccccacatcccattgactagtcaggcagggcagtgaggacacctcacagatggggaaactgaggcccagggaggtactcaagatgtgcccagtgggcagggctgagataaggccctggagtccagcctccaggcctgggtctgtcctgctctgctcccctgcagggctggtgggcctccttccccctttgaaggcctaacggcctggcttggagagagggggctcccggcatgggtgatggcagaggctggcacccttgtgggccagggcctgatggctcatgggagtgcaggggacattgatgtcaagggataggccagacgcctcaccttctctccattctaggaaaatccaagaggaagaaggatctacggatatcctgcatgtccaagccacccgcacccaaccccacgtgagtctgcctcagtttctccctggctcaccctggagaggcttcccgaacagggctcaatggaaggagtgagaggcaggtggggccagccctgctttacctcgtcctgtcctgggcagcccctgctgtgcatacagccaggtgacggctgctgggggttcatgcagcaccatttgctctgctctgctcacttctcaccctgtcttggaggctcgatgaggccgtgcccagctcagtgtagatgctcagcagccagtgagaggaggtggccggagaaggcgcctccggggcaggaggcacctcgtccccacgccaggccccacactggcccatctactgctgcacttggggaagggtgtggttctctctgaagctcacggagtcttctttctccacagacccccccggaacctggactcccggaccttcatcaccattggagacagagtaggtgccagccgccacccctgcagggcctctcacttcacctgacgagcgggtagagctgaccctgcagggccactttggggggaggtgactgaggggtcagagagggtcaggctctggagaagagcctcgtcctgcgctgctggctgtgtggccctgggccacccactctttgaccctcctggtgggaatgaggaccatcggctgcctgactggagcttggcgagcccagagctggtaggaaggtttctgagctgagagcaaggccctgcacctcatcctagccctaggggagagtattgaacatgcaggctcctaggccgccctggacccgctggatcactccctcaggccagcacctgggcaacctgcattttatgcttccagaagcctcggaagggcactagccattcagaatcctggctcagggaccgtgctatgccccgttcctcccaacagaaaccctactcccaggccaggtgcagtggctcacacctgtaatccccacactttgggaggccgtggcaggaggatcacttgagcctcggagctcgggaccaggcctgggcaacatggcgaaaccctgtctgtacaaaaatacagaaaattagtcagcgtggtggtgcgtgcctgtggccccagctacttgagagtatgaggtaggaggattgcttgaacccaggaggtggatgttgcagtgagccatgatcgtaccactgccctccagcttgggtgacggagtgagaccccgtttcaaaaaaaaaaaaaaaaaagagctgggcacggtggctcacgcctgtaagcccagcactttgggaggctgaggcgggtagatcacctgaggtcaggagttcaagaccagcctagctaacgtggtgaaaccctgtctctactaaaatacaaaaattagcccggtgtggtggcaggcgcctataatcccagctattcaggaggctgagacaggagaatcgcttgaacccaggaggtggaggttgcagtgagccaagattaccccattgcattccagcctgggtgacgagagtgacactctgtctaaaaaaaataaaccccattccctaggcctgtccttgacgatactccctccaggctgtcgcactccctgacactcaccatctgctgtcctgttcatctacttgcttactcctttttgtgtccctcccaagagagggaaacatctgtgaaggcaatacttttgttttgttgtcactgtgtccccagtgcctaaaacacattgtggatgcttggtaaacagtttctgaatgagtgactcattctagccagctgagtggggtcgggaaaagagggacagggcacctctttctcagagctgtacctgctggcggggcattttgtctcagtcacactccatagcagccttggggtgttggcactgtgcctgttttatagagggcatcgtgaggctcagagaggttaagtgacttgctgagggtcacacagcagggagcggtggatatgaggtttgagcccagatctaatcagctggtcctcttcatgctgcccaggtatctccactgggcatggggtgaggactggcttccagcttgctggccactgactctcttttccatccttcaagaactttgaggtggaggctgatgacttggtgaccatctcagaactgggccgtggagcctatggggtggtagagaaggtgcggcacgcccagagcggcaccatcatggccgtgaaggtgagcagggcctggaggcagctgggagggctccctggaggaggcgggctgagctctgccatggggccctgcctatccctctcagtgatcagtaccgaggctaggctttttggggcacactgggcagtggccccctgagctcctggccctcctgtcatgagtgtgggtgttggcctctgccacggcaacctctgaatggcagtccttccctgcagcggatccgggccaccgtgaactcacaggagcagaagcggctgctcatggacctggacatcaacatgcgcacggtcgactgtttctacactgtcaccttctacggggcactattcagagaggtgcgtccttgcatgatgcagctggggatctccacctcccacccatcagtcgcctgcaacccactgtcactcagtccctccagtacgccaggtgctggggacacctggcatactggcaggaggctcccccgtctcttggctgttactgtcctgctcagtgcctcagtttccttgtcagtcaaatgaggccggtggttgtgggtgcctcctaaagttgacacggaaggtaaacgacatggcctggggcctggcattcagctgcactcagttctgtctgtgtgaccattcgcatccccatggcatacagggcgtgggaatggcatatggggcgtggggtgcccaagcaggcaacggccatggagatatgagatctggattctgggttctaggtttgtggacaggatggggtgtgtgctgagagagtgactgaggctggaagagtggagctgccttccgccaagccgggtgggtgtgggtgagcagggaggccgggagcctaggcgatgctgggctcatactggtcacttgcccctcaaagagctgtggcagggtcagggcatctgagtccagccatcgggcaaggtcagggctgcttcacctgtcctcactcgtcactcatgaagagctcagcatcctctgtgccagcccctagccgatggggcccctgcagcctgcgggtgccccctgcgcatctcccaaccttcctgtcaggagggtcctcaggagttcactggggaagagggagcaggtccttgcaggcagggagccatctgccagggtcagctggcatgagggtgtctgtcggtcagcagggccggctgttgccatggagctggtgcaggtgcatcctgaagctctggtggagggacccagcgaggctgtgtgctaatcctcttcctccctggagacacctggaattagggatcagatagaggaggctggcgcccgaacctggcagtgcaggcagagttggagggtgggggaagcgggcaagtgggtggtgggtgggagcccggtgaactgtggctgagtgggtgggcacacgtcggagagggggctggggctggggctggtgctggggcaggcagtgcaggtggtgcagacacgggcagcccggcagcctggctgagctctgggtgtcacccacagggagacgtgtggatctgcatggagctcatggacacatccttggacaagttctaccggaaggtgctggataaaaacatgacaattccagaggacatccttggggagattgctgtgtctgtgagtggcctgggtgggctggcggggggtcctaggtgcataggcagaggcccagccctgccagcaggcatggagcctgcctattgatggtgtcttgggcagagctgggcatcaatgtgccccctgaacctgggcagctgccctgcataggcccttctcctccaccccagaccagagcctttgtgcttaggagacctccgctcctggggctcctggagccccacagatttggcagatccaggtgtctgagccattgattccaactcttgagttccagatcattttttaaaaaaggaatttagtatttacaacagcgtcatactaaaaatgccccggggcagctcacagaggtacaagctaagttgggggaaaggttagcatccaaaatgtgtgctttttgagtctaaaaagtccttgagggagggcagcaacactgggcttgagcattccagtagccaaaggaaaaaggaaaatagaaccagtgagactggttcaatcctcactgcatctggaaacatttacaatatacccctgcctcaggctccccacccagccttcccaagggaaatggctccaagctgctagaatactggctctgccacgggaggggagatgggacagggaggctgccaagagctgggttttacccaagaagagtgtggcaggcagtgatgatgcctccctgggaggtgagcccgggaggatgagaggaggcaggaggccgagtgtgtctgcaccaggattgttaggatgctggggcaaatgccaggacagggcaggaggctgggatgagagggtgcgtagcctgtgcagcgggagcgggagacaggtggacatggatggggtcttactgctctgtcgtttttgacgtgaccaggaataacagagtcctgtctcttccctcctccccaccccaccgccagatcgtgcgggccctggagcatctgcacagcaagctgtcggtgatccacagaggtcagtgcccggcagccacccaggcacggtgtagccagtgggagggatcccaggccaaggcgggtggacgtctccctatgagcaactgtggctccgagaggtgataggttgtgacgtgcccgatggggttccagccgctttccacctgcagccctgcagctgcctcccctcaggtttgctggtgctcgaagcaaggactggcttgacttctgtcctgagaaaggtggactgggttctgttctgatgtatagtttacaaatcgtgaaactccagcatagagtgcatataatcatgttcacacccatgcaaccacctccctccaagatgcaggacaattctctcaccccctcccagaatgttctcttgggctccttccctgccatcccccatgtgcctaaggcacccacaagtctggttttcccacagtgggttggtttcgccctttctggaacatcagcctcgcttgatgtttctggacccacctgggtctggtgtggtctcagtttgttcctttttgctgctgagcacaagtctatttttccagatttactgcttttcaaaaaatgaattaggcttagttcccattgtccactgggtgcccatcccagccccccaggtcactgtggttggcggttggcacggaaccttctggtcctttttatgtgcatttccatctttacacacatccccatggagggcacggggatgtgagtgtcctatgcgcatttgtatggagaatccctgctgggctgctctcccatgctggtctgtggggactccatgtccaaacacgcagatcctgcctcccaggctttaattgatcctgctgccctctgggagcacccacacaagccaggctctcactggacctcatgtctggagggcggatgcaggcacggtgctcccagcaaagcacctggagtcctgccttccttgcagtggccgggccgggctgggcacgtcctggctgttccctgaggaccaagtatgactctcagctggcccggcacctcttgcagcctcagttccctggtctgacccttgggaccctggtgcaacctgcccactggggcatgggagggggcacaggaggggtcttgggcgagggaggggggcacagctatgcagagcatggcacctgcctccagtcgtgctccacagacgtggctgaggcatgtccctccctggcagatgtgaagccctccaatgtccttatcaacaaggagggccatgtgaagatgtgtgactttggcatcagtggctacttggtggactctgtggccaagacgatggatgccggctgcaagccctacatggccgtgagtggtccccaagccccccaggctcaggagaggatggggcggggagaaatctgcccaggctggccaccccggccataccctctgtccgtaggggcagagcctccccacactgcgtttcctgctgtagtggggccacctgtgtcttgctgcccaggggcagcccttctgtaccccgttgttaactgacccccacagtgccccagttgggtgataagctcatggaccacctctgcggaggacactggtgggctgtgcaggtcccgccccgccctcattgtcaggagggccttaggggcctgctcccgggtagggtcagaccgatgcaagggttgggccttctaagcatgacccaggccctcctagcctcagtttcctcccccgtcacatgggcaggtgggctaagctgagcgctcagtttggggattgggaggcaaggcctagccatgggggcttacctggggcgggtgttcacgcctcactcttccctcctgcagcctgagaggatcaacccagagctgaaccagaagggctacaatgtcaagtccgacgtctggagcctgggcatcaccatggtactgtggggggccagggcctgcccttggtggtcaggtggggtgggtggagccgtgcctggggccctgagcttttgggggactcatcaaatagtttaggttctggaaagaagtattggcttcaaaatctgagaagaaaatgtgccatcagaaattaccatctatttaagggaacctcctagggtcagggtcactcatcgtgaagtcctgggtgctttgtgatatggtggccacagggctttctctggagttcttggtgcttgttgagaaatcacagccaatcccaaattacgtaagttcctggtatgtaaatcatgcaaaagcaagatggtaaagatcttttcaaaaatatttcatagcagaaggtttgttgtcggtggcgtcctggtacattgcggtggggtggtagaaagggtgggcgggctctcaatcctgggcctgtggaagccaaaggcatccctggcttgggtagggtgagggcagatgtggcagaagtccgaagtccaggtgtagggatgggcccagagcagttgcttctggagttgcctggcagaaccccatgccttccgtgttggggctcaggtcaaggtgtgggtgagcccgctctggctcccctgtggacagtggattggagggatgggaagaccaccaggatgtgtcccccagccagggctaggaagctgtgcaggagacgcgtggaaggacgatgccatcagcaggtcgggctcaggctggtggccttggccagttgagtggcttgggaccaatggagtgtcctgggcgtcagctccttccctgcccagggaagcctggcccaggacattcctgcttgtccctagtccctttgactgtttggtgttggggatgaggccgtcagatagaatcagtaagatgtggtgagaagcgctggcggggtgttttccaacaccgcaacccattctcggattctccagacacccacccagtgccctgcagttccgttcggttctgatgctacctggagttcgcacagaccccacaggttaagggctctgtcccaccagactgcccccaacatcacacaccagttggaagtagcgggtctcccatactactggactgaccagctacaaattgggggtccccatgaccctctcgtaaggtttgataatttcctagaatggctcacaaaactcagggaaacactttatttgtgtttactggtttatcagaaaggatataactcagggccaaccagatggaagagactcacgggggaggggtgtgagtgtggggtgcagagctgccgtgccctctcagggcctggcaccctcctggtacctccctgtgcttgcgaacctacaggcttctcaagctcatggaattttgttgtttttgacacagagtctcactttgtcacccaggctggaatgcagtggcacaatcttagctcaccgtaacctctgcctcctgggttcaagcgattcttgtgcctcagcctcccgagtagctgggattacaggcaccaccatgcccagctgatttttgtatttttagtggagatggggttttgccatgttggcgaggctggtcttgaactcctgacctcaagtgatctgcccgcctcagactcgcaaagtgctgtgattacaggcatgagccaccacgcccagcctcacatggagaggttttttgtgagagagggtctcactctgttgctcaggctggagtgcagtggtatcatcgcagctcactgcagccttgaactcccaggctcaagccatccccctacctcagtctcctgagtagctggaactacaggtgtgtgcccctatgcccagctacttttttaatgttttgtagaaaaggggtctcactatgttgcccaggctggtcttgaaatcctgggctcaagcaatctgcctacctcggcctcccaaagtgctgggattataggcacaagctactgcacccactgaaagtttttatagagcacagtctccaggcccccctcctctcagcatcagttggcgggtgatgctgagagttcccaccctctataatcagctgggttttctggggagcagccccatctgaggctgtctaggggccttaccctgagtcacctcattagcataaactcaggctccttgtggataacaaagccactcctgtcactcaggaaattccaagggttttaggagctccatgccaggaacaaagaccaaataaattcctttttatgccacgggggtggagaagactggagcaggtaggggtggctctggggacaggtggaaggccactgttgcagatgcggaggcctctgcaaggagggcaccctgctgacctgagggcagggtagaccagggggtgcaagtgcaaaggccctgaggtggggctgtgcctgctgtgtgcctgggtggctgggtcagaggagagggagggagggttgggagcgagcgaagagaagtgtctggtgggtagagagttgacgcaggtgttgtgggttttactggtgttgctgctaccattgttatcatcatcatgtggttataactttatttatttttaatttttatttttttgagatggagtctcactctgttgcccaggctggagtgcaatgggacgatctcggcttactgcaacctccgcctcctaggttcaagtgattctcctgtctcagcctcctgagtaactgggattacaggctcgtgccaccatgcccggctatcttttttttttttttttttttttttttttgagacggagttgcactctgttgcctagcctggagtgcaatggcatgatctcagctcactgcaacctctgcctctcgcgttcaggcaattctcctgtctcaacctccccagtagctgggattataggcgtgagccaccacacctggcaaatttttgtatttttaaaaaagacggggtttcaccatgttggccaggctggtctcaaactcctgacctcaggtgatctgcctgcctctgcctcccaaagtgctaggattacaggggtgagccactgtgcctggccttttttttttttgagggagtctcactctgtcgaccaggctagaatgcaatggcacaatctcagttcactgcaacctccgcctcccaggttcaagcaattctcttgcctcagcctctcaagtagctaggattacaggcatttgccaccatgcccggctaatttttgtatttttagtagagacggggttttgccatgttggccaggctggtctcaaactcctgacctcaggtgatccacctgcctcagcctcccaaagtgttgggattacaggcgtgaaccaccacgcccagccttgagccactgcgcctggcctgtggctgtaactttataaatagtgtatctgtagacagtgactgggaaagactcaaagtcgaaataattttgtcagagaggtgggactgggccataccttcaattttctttaattggtgacatgtaatttttcaattaaaattttttttttttgaggtggagaggaatattcaggctgaaggcaggtgctgtatctgcaataacagttttccaagtcctaagtttgatgcaaaggacaagttcttgctgtatttagactgcacagaactggttggatattagagaccctgctcatgactacctcacacatacacacaccctatgtcccttccccatctccctgtctcccttccagttgtccatccatcatgattgttggggccaccatggctagtggccttctgatatggctggtggaacttggacaagtgtgtgctaagtgtatatttcagttatcaaatattgcatagcaaaccaccctagaacctagtgacccaaaccaacagcggtttcttatttctcatgtttccaccactgtggctgggctcagctggatggctcttctgctgtacctgggattggctggggtcatggctgggctgggctggtctggaaggcccaagacggcctcacaaacatgggcctcctctgcctggcctctccatgcaacttactcacattggcctgctccctgggcttcagagcatggcagtgtcagcagagttggagttctttcatgatggctggcatctaaaaggaagttctctgaagtgctaggcctggaactggcacagcatcacttctgcctcattgtgttggtcagcgagtcacaggccagcccaggttcaagggcagggaatgctcccggcttaatggaggatcagcaggtgcacacagcgggaggcggaggtggtcactttaggcacaggttaggtttttctttcacaagttacaaacgtagtggaaacctaacataaaaatagaggcacagtaaggggaaaatgactgtagttattctacctagagacacctcttaccccgtttcagtgccaacattgtgcattatattatatatataatatttttattacatataataaaatacgttttattaaaatttagagaaatacaaacaatatgtaatgcttctctttttttgttgttgaaacagagcctcgctctgtcacccatgctggagcgcggtggtgcgatctcggcttactgcaacctccgcctcccaggttcaagtgattctcctgcctcaggctcccgagtagctgggactacaggcgtgcgccaccatgcctggctaatttttgtatttttagtagagatggggtttcaccatattggctaggcaggtctcaaactcgtgatccacccaccttggccttccaaagtgctgggattacaggtgtgagccactgcgcctggcctcgtaatgcttctttttaaaaaactttttaaaaaaaattttgtagcattacatgttgttcatatttgtctctctctctctgttttttttgttttttgttttttttgttgtttttttttttagatgtagttttgctcttggtgcccaggctgcagtgcagtggtgcaatctcggctcaccacaacctctgcctcctaggttcaagtgattctcctgcctcactcaatctcccaagtagctgggattacaggtgtgcaccaccacatccagctaattttgtgtttttagtagagatggggtttctccatgttggtcagactggtctcgaacccccgacctcaagtgatctgcctgcctcggcctcccaaagtgcttggattataggtgtgagccaccgcacctggccaatttctctaaattataatagactcctgtatgtatcccttccaaagactccataaccatctgccaccattcagtcaccctgtctgctgatgtgggttgtttcccttgttcctgctgttttccttccatttcaaattctcagccatcctgggggagcgactgatgaaacagagtcgggagagtccccctgggtggggctctggcctcggcctccccccatcctgcaagggccccagagctctcttggcgttggctttttcccactcactgcacaagcctcaggatgccagtgggaatcacccagaacagacaggggtcatgccggggatggcccttggccaggagcaagtgctgactgggtgctggcctgttagtgttgtcgctggggagtcacaggggtgcgactacggtcctggctgggtctccgcccccatggtggggccggcccctggcgctggacattcaggctgtttcttagtatttcctggcagaaaacaccatatggcacatcttcgtgtctggaggctatttttgttgtttttcattttttgagctctttagaaaaaataaaggagtacgaggttgaaggtttggacacttctgcttttctaattataactctcatggccgctggtccttctcctgtagctcgtatggggtacttgctctacatattgcagtcagtgaaaattctaagagaaaagccccccaaatcggtacggttttgtcctgtgaacacgcatgcacacatgcacacacacgcagtgggccctgcctgtgtgggtgtgtttgtctgagctggaaagggcctctagcctgatgggaggcacagtctcagcacagtccttagggtcttgtccgggctccagttgccagtgccaagtgtttgtgctgaggtctcttccgttcatcatggtgatgacggccggcagtgagggcccttgtgctggagcctcggaattctctgttcttccaggccggggccagggctgacataacttgttttttccatccagtcatcatgattggagcccagagttggttgtaagctagctagtccgtcccttccatgatgacttcctgccaaccacagggctgggagcttggagcgaggacagagacccaccggcccgatgtcacccacaggaaatctggatccagcagggcacatgtggccacacaggccacttgtctaggagggaaactgctggggccctgcagaagatgaggctgcaggctcacgggtgcagaggcgaagcagcctcatggtctcacactctgtccgcggccttggagacagctgtgtgtgtgtgtgtgtgtgtgtgtgtgtgtgtgtgtgtgtgtgtagcatttcccatgtgcctcctctgtgaaaacagcccaaattaatgacagcagatgctgaagtctgagatggtcagatgttaggaaggggattggctgtgaccacctgggacctgcccacctggctcatgaggctacggcccaaagttgccagctcctcagatttttccagagcagctggaacctgcattgttttgtaaaatcttcagaattcaggttttctgaaaaccctatgatggtcccaccagtcccggtgtgggctgaatctgcttcctgagctgggtcctgctggctgggtcggaggagctaagagctggcatccccggctttctcgcctttgttctgctgggatgtggtagggagatcagctgtgcagctttgacgcctggctctggtaccaggatgggtgggagcccccaaccctcgctcctgggtgcagagcgtggttgtatctggggccggggcctctgaccccctgtccccgctgcagattgagatggccatcctgcggttcccttacgagtcctgggggaccccgttccagcagctgaagcaggtggtggaggagccgtccccccagctcccagccgaccgtttctcccccgagtttgtggacttcactgctcagtggtgagtcttgggtgctgctgagcgcctgccactgcccctccctggccagatccctgcaccttcctgggccctgttcctttattcctttggcaaataaacccccagatgacttggcatccaaatatgtaaggcagaaacagctggagcatgaggagcatttgacaaaacgatggtcttggtgggagattttaatacagttcttccagaagtggacaaatcagatagactgaaaaagagaacaaagtatatggaaaatttgaacacaaaaaacaagtttgcttttattgatatctagaactttgtaccaaattaaagaatgccccataggagccttataaaaatcatgtttgagaggctgggcacggtggctcacgcctgtaatcccagcactttgggaggccgaggcaggcggatcccgaggtcaggagtttgagaccagcctgaccaacatggtgaaaccccgactctactaaaaataggaaaattagccgggcgtggtggcgcatgcctataatcccagctactcaggaggctgaagcaggagagtcgcttgaacccgggagccggaggttgcagtgagcctgagccgagatcatgccactgcactccagcatgggtgacagagtgagactgtctcaaaaaaaaaaaaaaatcatgtttgaggttacagaaggaataaggaagagggcaacttctctgaacttaattaaatagagcaagaattgggtaaggaagaagcggccgggtgcggtggctcacacccatggtccccgcacttttattgttgaccataatcagcaacagaggagcccagcagagtccctgggcagtctgacccctttaattgtggactaacttctcccagaacccatgataaggagtttctctcctgattgaggataccaagtgtgtgactgttaggcagagcattgcagccccattttggtgttgatatggaaattcctaggtcactatgcagacaagaaaaccaggaccccaggagccagagaaacttgctgcaagtctctagtttgctcctatgaatgcccctccaccctggaagaagccctagacagtcctgtcccttcttccctgggtgcacgtgtcccctgctgctaggcctggggcaatcctggggtggtttggctggcccttgggggctgggcttcctccctgccagcctggccacagctgcactattctctcctagcctgaggaagaaccccgcagagcgtatgagctacctggagctgatggtgagtatgggcgggaggtgcctgccctgctcttcagggctggctggggctgggtggggctctggggagagggctgcatcctgcacacagatgggtagctcctctggctggccctgtgttctctcctttaggtgctcggtcatttgtttgctcctgcatacctggctccctcctccctccttcctgcatgccaggccctgggaagggtacacaggcagtgtgtgacagaatggggcagaggggccaagggtggcatcagggaaggcttcatggaggaggtaccatttgaactgagcctggaaggatgaataagggttatctcctgatggagaggctgtcccaagcagaaggtccagcatgggcagaggcctgacgtgtggggggaaagggaggttagtgtggctggagagtgaccacaagagagctgaggaggagccacagatgccatctgtgacagtcatggagggcctcctgggggtggaggtcctagaaggatgagtaggattttgccagtcaggagaacacttgggctggagctggttggggaagagtggccacctctccctcccgctacccctccatggtgactgtgccttctgtcacccccaggagcaccccttcttcaccttgcacaaaaccaagaagacggacattgctgccttcgtgaaggagatcctgggagaagactcataggggctgggcctcggaccccactccggccctccagagccccacagccccatctgcgggggcagtgctcacccacaccataagctactgccatcctggcccagggcatctgggaggaaccgagggggctgctcccacctggctctgtggcgagccatttgtcccaagtgccaaagaagcagaccattggggctcccagccaggcccttgtcggccccaccagtgcctctccctgctgctcctaggacccgtctccagctgctgagatcctggactgagggggcctggatgccccctgtggatgctgctgcccctgcacagcaggctgccagtgcctgggtggatgggccaccgccttgcccagcctggatgccatccaagttgtatatttttttaatctctcgactgaatggactttgcacactttggcccagggtggccacacctctatcccggctttggtgcggggtacacaagaggggatgagttgtgtgaataccccaagactcccatgagggagatgccatgagccgcccaaggccttcccctggcactggcaaacagggcctctgcggagcacactggctcacccagtcctgcccgccaccgttatcggtgtcattcacctttcgtgttttttttaatttatcctctgttgattttttcttttgctttatgggtttggcttgtttttcttgcatggtttggagctgatcgcttctcccccaccccctagggtaccagcaggcagagccttgccctctgctcaggctggggtccagtgggaggggcccaagatctctgctcagagaagtgcagggggagccttccagctcactctccctgaggactggcttgacaggggctatgggtttgctttggtgttgtttttaaaaaaagaaaatatatttttttgaaaaaacgactgcccatcccgggtcctttccctgatgggttggggcagttacctggttgctgttttaattaaaaaaaaaaaaaaaaaaaggactaaaggttgtgtgagattgtgtatgacacctgtgagcccccctcttacttggggaaggttgtggcccttcaagggacccttgtctctgggccaggggcagggtgtcgtgctcaggggagggaggactgccaacctaccaggcccttctacatctgaggacacagaggcccccagagggctgtgatgaggtaacatcctgtgatcatccaggcaccaggccctgtactgacactggacagagcagcgaacacacaggtccagtctgctggtggcggccacccatcccactgtcctgaagtagtgatgacagccaggtcacagagcagcgagcaccctgcacactttgcctgggctggacacggtgacctcatggaggttacctgacctccagtttacagatgggaacaacagacccagagagctgacatcacttacccaaagccacacagcttataagacagaaaaacagacttggggacaggtggtgggctccggagaaggctccgaggggagtaggggcagcctgatgaaggcgccctgcagtctggccctgtgacgctggcagcatggctggggcagcagggaatttgctcacgtaagccgggtgtgctcagcttcaggtaccgttaggttcgaagttcagctgatggcctgaaggacttgcatccaccttggctgttcatccgtctcaggttcaccccctcatggggaccagtcaggacccagggactccaagagctcggcacaccgtgcccagggtactcctgaagtcccaggactggctcttaccagctgggaaggagtcgaattcatccccaggccaggagggtgggtgtgacagctcaggtcaggtcaggcatgaggggactccgcccactacagctcaaggtctgagagcagggtctctgtggtcctctgaggaagcttagggtgtgttcccaggaggagggtccccatggggtctgtctctgcactcctcctgtcctccagccccagtctgggacaggtctctgcccactaacccttccctggcacaggggcgaacagttcctgggagctgttgtctccctctctccatccttcaatcatgaagacttgttttcaccccagggcctttgcactggctgtcccctctgcgtagaacaccccctcccccgtcttcctgtggctggctccccccaaccccatcccggtctcccatgtcacctcctcagcgaggtcttccaggaccactctggctcaaacagcctccgcccactaggcccagccaatctagcttattatcctgggttatcctggccgagacctgacttgtcactgttgtgtcgtcagcgctgagaatgctgccgacaccgagggagcgctcggcttctgctgaatgaacacatgaaagaatgaatgagggagggagggaaggggggagggagggaatgaatcccttgccggggcgcggccccaggctctgtctcctgtagccgccagggggcggtagagctcggcttc

SEQ ID NO: 353 - DNA, 76895 bp, Homo sapiens
  source 1..76895: mol_type = genomic DNA
gaattgcttgaacacgggagacggaggttgcagtgagccgagatcgcgccactgcactccagcctggacgacagtgtgagactccatctcgaaaaataaaaaagaaaaagaaaagaaataggggagagcccaaggtaattcttaagggatttgacactcaaggcaaagccaccactaaatgttcttagtggacagtggacaatgacatctgaggaagattattctggagcctgacatattacactggaacagaggccggagaaaggagcccacattaattgtggtggacttggaatctgaagatctgagtgtataaaatgttgaacaatgaaaaggttggggaaattaattatggtgcctttaattttgaaacatcatgcaatcagtacaattgttttggaaggatatttggtggcacgggaaaacagaataaaatgtaagcatactacaaaacaatacaaagccatttttgtcaaacgcctatctaggtaggaaatagattatctctggggtgggatcttttctttttcatagttttctgcatttttcaattttcctacaaaaagctcgtgttgcttttataagaaaaaagttattttctgaaagaacctctggcggaactcagatttccagggacccacatgccagcactatcccagcctcgggtgtctgaggtacctagaccagagggtgtggccctggaggtgtgagacagggaaagctgggctgggccggccgcccctgcccggggcaagagcagcgtcgggaccggaggaccagtcgggggatggggccgcagaggtggccgcgcgccgggaagtgctcaggccagaccctccccactcgttacacgccctgtgctgggcacggggaggagcaggacgccaccctctggaaccacccagatcgctggggcctccgagaacccggagggcggaaggcctgagggccccctgcagccgcctactcctcaccccagccctaaagtagccggcggggaactgcgccagcccgcgcgcccgccgagccttcggtgactgacgggaggtgggaatgtgggcggagcctcacgccggagctgtgattggaacaaccaacacctcccaatctctcccaagagagggagacagcaccagagagggatgcgcagaggcgggggcttagaggcctctacgtgattggctaacagcgcagggagccgggcgctgtcccgatgattggcaggcgctagacagccctcggaaaccgccttggcttcgcccattggcatcctgtgagagtaggcgggattggttcatcgtgtggtgctgatgattagctggccgctgagagttagggtgttgggagagagttggagggggacggcgggggctgccgacttccttcttgttattggctggtgaggtgggtgggggtggtgcgacggcccagcggctgcctgggattggtgggggccggcgtgagtgacagacaggggggcgagctgcgcgaccagcggtttgtttttcggagcgttcctgaggtggagaacggtggccggacggagagactgcgggtctgagggactggcgggcgggcgggccgagcggcgccgccgaggccgggctgggccgagcccaggagcgcccgggatgtagcgggccaccctgccgatgccacagcgcccggccgcgggcggagccggagccggagcctggggaggcggcgggggcccagagcgcagcccgcgccccccgcgcggagccaggcccgctgccgtccccgccgcccgggcccccggcatgcagccccggctgcggaggtgacactcacggaccttagccaccgccgccgccatcgccaccatgggtaagtgtcgccaccgccccggcctgtgcccgcgctgcttcgcgacgccccgccccaggctgagggaggaggaccctgggccaccgcctgacaggcatggacagcccgcccggcccggggctgcggaccgccggccggccggccgcccgccccgctcgcgcgccgcggcccgggcgggggttctggctccgcggggcggcccggccggcagagcccgctcggcagccctccttctgggcggcgcggcgggcgcatcccggggaagcggcggcgggaccgagggcccgtgctccgcggggcagcctggtccgaacgagccggaccgcgagcccgagggcgggggagcaagagcgcagtgtggggcccgggctggaggctgccgcaggcccagctgctgttgtgtcttttccttgatttgcttttttttcctgcctgtgtcatttccttccctttgctcacacaggccggcctgtgagagttcccggggcttgctctccagccctgtgcgcgccccagcgcaggggggagggcgtgcggggctcggctaggaggcgattaaactggagctgtgatcaagcgcgcggttgacaaatgcgtgctgcacgcagattgctgggggtcaggagttggtcggatgctgccagttagaattcacatcctactttttgaaaaatcccgttgcaggggtttaatccattatttttttcttgcggtatccctgaaattatgtaacttttgaaagaaacatttgctacacaaaagaatttctctgaaatcacttcctttttgtcagtatttacaatttctactgtgaagatgtaatctaaggaaagcttttaatgtcttccgcacgtagcatttgagttgaattatattccatatcctttttggtagtttagcaaatgactactggactagactaagaaataacattttaaacgttctttacttctcctgcccagacaggtgttgtgatactgttgtcacaagttttgcaaaatatttggtattgccctaaataataataaaagggtaaacttcagtgagaggatcgtttgcaaaacgttccgttgcttctgtgaagtgccccatgtgaagagggagccttaatgtttgccttgccctatagcaaggtcaagtcctttttgtaggaggttaactgtacgctatgtcaaattcgccagatattgttttgtgacccatctctacaccctggctttgaatgaattgccttgttctagttcatgctgtccctcatacagtatgagaagggtttgttcatttgctgggcttactgtttccttctcatgctttccttcagaagtgcgtgctcttctgagggaaggtctgctgtgagagtggacataaaaggaacccagtaaggcctggtatttaaatatataattgaagaaatgtttattgaatttttttatagatgagacacagaattcttgtctaccccaggattcaaacatttatcttgtattatagattttgaataaatcttcgaattgatttatgagcctgtattgtgatagtctttcttacaagtcttttttcttgtcctgtgggggcagctgttagtcccaaaggagagtgtgaaatacttaagggtatgtagaccatccacttcctactttgttgactgctacaccagttagagtgcccacatgtgttgactacatctcattatctaacatgaaaatagatatgaacctgttttcacatttcaagacattttcaaaaagtttataagtgtgtgagtatatggagaccaatgatggggaggaaggaaactatataggctgggtctagagccccaaagaaaaaagggccaggacctcaggatcttctcatttgtccccacatcagttgtcctcctgtcagttttacgtgaagacacatgtaaaaggaacatgcaagaggaattaacttccctggtggctgcagtatattaggcaagctagtttaagaaccactgccctagctttcttcactttcccccatacaattctctccatcttttttgtgaggggaaagtagatgaccttgatacactgttagagctaatattgaattcttcttgacacctggctgttcaatttgctttgtatagagctcattgaggatatgtatacacagatacattcacacacagtctctctcttaaatactagtttccattttggtgatgaaaatttgaatttccagtttagttagtttgcttttagttgctgtagttctaaataaactcaaaggattgataagagagaaacatagacttcttagtattttagttatacttgttaaactccagcctcatgaagaaaggactaaaacttgagtctctgccctgcaggttctttggttaagtaacagtcacattttcctgagctgttctaagcccaagactgaagcctgtttgacaacttgggttaataaaaacatgtcagattttatattgtctgttagccccaatgaatttctagtggaaattatttatctctgtaaataataggaaatttttttttttgctttgatactatgtggctataaaaaattgggattgactggttgttttttcttggtcactccagaattcatttccagatttagtaatcatagtggcaaatgctgttcataatacctgagattgtttatgtggtctttttataaacgcagtctgaaactttatatatcactgaaaaatatgtaacaacttggaaatgctacaggaaactatagtgaatggagtacaggattacagatgatctggttctggtttgaagtcagaattattgtgacttacagacaccttgtctagggttccaaggctgttaggagctccctgttagaatagtctcaattcagtttggctagaatctgaccacctatgtagactctgaatagttagcagctgttttgattgaaatttgaatcacagtttaataaatcaacatggctatgtcattactagatttctgatatttttaaaaatgacagttggattttaaaactgaattttaggttgggcatggtggcttacacctataatcccagcactttgggaagctgagactggtagatcgcttgagcccaggagttcgagagcagcctgggcaacatggtgaaaccctgtctctactaaaaacacacaaacttagctgggcgtagtggcatgcccctatagtcccagttacccaggagaccgaggtgggaagatcatctgagcctgggaggttgaggctgcagtgaaccatgatcgtgtcactgcactccagcccaggcaacaagagtgagagaccctgtctctaaaacaaaaaacaaacaaaaaatagctgaattttaggcatctgtaaaaagtaagtatctgtccaactgagcattacttaggggaatacacagaggataagatgaggtttttctggttctatggaagctgttaatttattctttgcccatttgttgaatgcctcctatgtgccaggcatagtattaagccctgtgcctgtgttatcctgtcctcaagaagttacagttaggtaaggtgaagcagaaacatgtaaacaattaagtgcaaaagtgtgtaaagatatacaggagagagatcaattctgtcgttttggtattgacacatgtaattctatagtctccagtcctttgggttaatttcactaaacgttaaaatgtagtggtgatatatattgattcttatgaggaataaatggcctactttataatatgtgttttaagaatttgaaccatcaattaatattgaatgcctattatatcttagaacagaaaaacgccagcatttgactttgagatttagcaaaggttcaaccatttcttgaaggataaaagtttcttatgaattgagggtctggccttattgcatatactcattgtaaaatgatgtttgcctgggcatggacagggtggaggcagtggaagtatgtggaatgtcatgaagagaaagtaaaatctgactcagggacactgaagcacagactctcctgagtgggcagtgcgatcagacgatctggtggagctgggtagaacattgtcaagatgaagaaataacatcattagttaaatgaaacaaaacaaagattaaaacattactttggggattgtatctatggaaaagagagagagtgtgtggcatagtaaacagacaccatacgggataacaatgtttattagagaatgtggtgcttctggcaacttttctgggttgttagccaagggaactcacaaatgggaagtgccttaagaccctgctttgagatacaagtaatagctcagtctggaagagtggcttcctgctggagctaaagagaggagtatgttgcctggcagcctccataccacaggttggggtaccaggagaagaaaaactacatgccactggggaattacttaaaactgcctaagagcttctactttttaagcctgaactctaatccttgtttgatagatccttttctagttccatgaatactcctccttttcctagattcttaacctcttaatctctaaaattaacctctttctccttatgcttcttcctggtagcttctaagtgtgtcagaccactcccactctcaggaaatcttttcaaagttataagcacactattacgctacctcaacttgttcacgtgtaaagttcacaaatactttttttttttttttggggtggagttttgccctgtcacctaggcttgagtgcagtggcacgatctcagttcactgcaacctctgcctcccgggttcaagcaattctcctacctcagcctcccgagtagctgggattacaggcaccggccaccatgcctggctaattttgtatttttagtagagacagggtttcaccatgttggccaggctagtcttgaactcctgactgcagctgatccaccctcctcggcctcccaaagtgctaggattacaggcatgagccatcgtgcctggccatgactaattttttgtattttttgtagagatggggttttgccatgttgcccaagctggtctcaaactcctgggatcaagtgatatgcccgccttggcttcccagaatgttggacttacaggtgtgagccaatgcgcccggcctgtcactcttattttcttcaatcctttttttttttttctgagacagagtctctactctgtcgcccaggctggaatgtgttggcatagtcttggctcactgcaacctctgcctcccaggttcaagctattcccatgcctcagcctccacagtagttgggattacaggtgtgcaccaccacgcccagctaatttttgtatttttagtagtgatgaggtttcaccatgttgaccaggctggtcttgaactcctgacctcaggtgatctgcctgcctcggcctcccaaagtgctgagattacaggtgtgagccaccacgcccagccagcttgcttttcttaaagaatctttagtctgttaacaattatgtaaaatcatccatataacctcttatataaccatataagctactcatatttaaaaatatttatttttatacatttgtatttatatactctggtttatatattgtctaattctgtctttttttttttttttgagacggagtttcgctcttgttgcccaggctggagtgcaatggcaccatcttggctcaccgcaacctccgcctcccagcttgaagcagttctcctgcctcagcctcccgtgtagatgggattacaggcatgtgccaccacgcccagctaattttgtagttttagtagagacggggtttctccatgttggtcaggctgttctcgaacccctaacctcaggtgatccacctgccttagcctcccaaagtgctgggattacaggcgtgagcccctgggccctgccaattctatcttttttttcatacaactttgtatttgtgtgttgtttatctttttatccctagagtttgaacaccttgaaatatcttttaaaactttctaatgtgtaatacaagataagtattcagtaaattgttgttaatgatttataaaagttcagtaataaaattaagtattagggtagattaaatggcctccagtctttttccattgaccttttctcattgatgataataatagccagcatttttttagcattactgtgttaggtaccataagaaataattcgtaggttttctgttgcttttaactcccacagcagctttgtgaaatgatgctttatctccattttacagatgaggaaattgaggtttggagagaataaatgatttgctcagggcctccttaccaaatttttctgactctgaagttcatattcctaactgcttcagtctaagaaagttgttatttgttgtttttttttttgagatggagtctcgccctgtcgccatgctggagttcagtagcgctatctcagctcacaccaacctccgcctcctgtgttcaggcaattctcctgcctcagcctcccaagtagctgggattacaggcgcacaccaccacgcgcagttaatttttttgtatttttagtagagacggggtttcaccatgttggccaggctggtttcgaactcctgacctcaagtgatccacgcatcttggcctcccaaagtgctagaattacaggcgtgagcctctgcgcccagcctgttatttgtttttaaaagttttgtttgtttttaaagaatgccacattggaggagtgctgataattcagttagtctcagtccataccacagagataactggcttgtggcagccaagtgtgcatagtgatgttgctttttagaaggaaaaaaaacaaaaacaaaacctcaatccaggaagaaatgcctaaaagagccacttgatttacttcctgtctttatacatgtcctctgaagtatcagttgaagaacctgtctacctctaggaatgtattttactttgacacaaaattagattctataaccctgattcacttgtgtcagttgtcccagatttcagatgacagtgccaaacttttccactagtgtgttctcagctctggaactactaaacaagtttgttcattaagtaatgccaggaattggttagcttcctggaaacagaatttgtcaacctgataaaccagctcttataatagcgtcatcttatacagaattagaaatgatttcttcagtcatacttgtggatctgacttgaaaagtggtgtgtgtatgtgtgtgcctgtatgtgtattcacatccatctttgttcaatatctgagttgaaagaactgaaaattctcaatacttagggtggttaatgttgttactgataactccttgcattccgcttttaggagtattgttggatgctcctcagaaaacacttaaacctagtcataatcctccttgtattgatcccaatttattattacagttggcccaattttatatatatttaataatatctaagccatttaatatataaacctatacatattatatataagccaatcttcctagcttagatgttatgctctagtttttaaagtttggttgtgaggataaaaatcaaaacaaaaaaccaagttccctttttgtttttgggacagggtctcactgtcgcccaggctgaagtacagtggcatgatcatggctcactgcagcctcaacctcctgggctcaagtgatccttccacctaagcctctcaagtagctgagcctacagcgtgcaccaccatgcccagctaattttttgtattttttgtagaatgtagttttgccatgttgcccagtctggtctcgaactcctgggctcaagcaatccacctgcctcagcctcccaaagtgctgggattacaggcatgagccaccctgtccagccaggttcccttctttaaagaagctatagggaaattgtagaaggtataaaataattgatgggatatatatgtgttaatttgacagatgtctttttgtagatacccactttctcctcattcattatcccctttactgcatgctttctatattacagctatgtcactctcatacatacttttgtatatgttttgaagtggaatcatatgggaagttatgctcctggtggttttcctgcaagttttaaatctaattttactttcctgaacaagcaaaaacctctttataggcaactttgtccttttctgtacctcgtcagagggcatatagggcaccagagcagatttcgtctaggaagaggggagaggcaaataaggtgaggggccaggcacggtggcttatgtctgtaatcccagcattttgggaggctaaggagggaggatcgcttgagctcaggtgtttgaaatcagcctgggcaacatggtgaaaccctcgctcaataaaaaatacaaaaattagcagggcatggtggtgtgcacctgtagtcccagctactctggaggctgaggtggaggattgtttgagcctgggggtggaggaggctgcagtgagctgtgattgcaccactgcactctagcctgggcaacagagtgaaaccctgtttcagtcagtcagtcaatcagttaatcagtagtgggagaagagacttgagcagttttacttcctacatttcatgctgttcgtttctttccacagggtattagaatatttccaagggacagtgataaagggtagaagataggcactctctttgggtggaatcttttgtatttgcttcttttaaggtgtgccccaagtccccaaatggctcagttgtcaccaaagcaagtgtaacaactcatccctcatgttcccttcacgatcaacagatttattcattttcaatctccaaatgctatttgaatgggcaaagatctcttaaaggacctgggaaaaatttgtacaacatggaattggactggtttgtgttctgggttttggccagttgttttcaatgtatgagaactctagtactccatgctatttcaagaaaaggggattaaaagtaatgccagtaaggtggagacaatgcattgcttggtcagcttagggaggaaaaacaatagaactaccctttgacttccccatgggaagtagtaggcctataaacttgtaaagagttgtgggggttgctggtggtggcggcattcaaatgctaggcttgtaaaacaacttctgttcaaagcagttacctgaggcccttatttggtaccttttaaagtgtgctctcctccttatgatgctttaagaataagtctgggactgacactgtgccataatcctctctctatggattcatcttttcattcagtaccatattacattgtactgtgttcttcacttcaatttttcatctatttttcctggttaagtttctctggcactggaccaactgccctgtttgagcgtgtcccttccctgcaatgaattggtaaatattgctgcaggaaatctgattggagggctattaagaaaccattaaaggccaggcatggtggcccacacctgtatgtaatcttagcactttgggaggccgaggcaggaggatcactggagtccaggagttggagaccagcctgggcaacatggggagaccccgtctctacaaaaaataaaaaaatcatccaggcatggtggtgcatgcctgtgttcccagctactcaggaggctgatgtgggaaggtcacttgagccccagagttggaggctgcagtgagctatgatcacgccactgcactccagcctgagtgacagagcaagaccttgtctcgaagaaaaaaaagaatccattaaaattcaaattgccatagtctgaccttttgggctgcatctgattatagttacagggtctgtcattttacctgggcagaactccctgagtattagttatacagtttgtgaaagagctttgctggtctgtatttaagtgtcttagtccatgtgctctctttcattgcagacgaacaggaggcattgaactcaatcatgaacgatctggtggccctccagatgaaccgacgtcaccggatgcctggatatgagaccatgaagaacaaagacacaggtcactcaaataggcaggtgtgtgtgaccctggcagagctaagtgagatttgttggggaggggttttcaaatgggaaatatacgaaaagccaaggagactacattaccagggttgaatgcttttgaccccttcctttcacagtctgttaaatgggaagtaatacataccaaccaggtatggttaaatggtaagtgatattgggaggccgaggcaggcggatcacctgaagtcagtagtttgagaccagcctggccaacatggtgaaaccctgtccctactaaaaaacacaaaattagccaggtgtggtggtccatgcctgtagtcccagctactcaggaagctgagacaggagaatcgcttgaacctggaaggcaaaggctgcagtgagccgagatagcaccactgcactccagcctgggcaagacagagtgaaactctgtctcaaaaaaaaaaaaaaagttatatatgccatgcagttatggatctatgatttggagtcttaaagccttgtgtaagcatttcatctgttatggggacagtattcatattcgtttttcccctttactgatatttggcaaatatttaattcagattcatgatccctaagtcagaaggtttttagctaccttacagtatatagtcaggaaaaactaattaatttggtattagcttatgtaaaatataattaagaaggtaaatttattaattaaaatgtcacctagtatattctgaaggcaataatgagtgattttgttattactgtttacagttattttaccttattaaccttattgatagtgcctgttttattgagagttgtatgcttctttaggaaaacattgcctattttccttaacatttaaacttgtgtgtcattgacaatcttcttctcacctgtagtgccacttacctgtttcctgggtactttgttctgcagagaggagtgaatgatggggagctttcctacctagtgggtatccagtgctgtgtcagctagctatattgggcatgtttgatgaaaatttgtgtatgacattctcccttttggttctgtttgttatcagctaacctcctttcttctcatttgcaccttgtttaccaattcttcagaattggttcctagagatagtataaggccctaaaacttttcctgtctgtggtctgctagatagagccttccagagtatttcctgcctttaggaatcctagggaccccaagggaagaggagtccttttgtttcatgttaaaacagaaggattagtttaaaaagctgcttttgttgttgttaccttatagtactggaggtataaacagataagggcccattcttacactattttcatatgttattcagtctgactgtgtgagttctcccttgctataactcatttgtattcaaagccacttttcgaaggagcattttaccagaagtgagtcccctcccccttgcttgagcctaatgacctcactttccttcctgtcttcctatgtagtgtgtgcttgctaacattgctccagttagctgatctttctccagactggactattagcatgaatatcagttagtgggtgaaaaggggaagctttcttgaattggaaggcccaaaaggacgaggctgggaaaaggaggggcggaatggtcactgatggttccttgaaggaggattcctttttaggactccttctgcttagagcctaaaagccatgatgagggaagtcttgatcttttgctgtgcctgctgctgcgctggtagagtgaagtcagtggttatgaaggcagaagcctaaaaaggattgactgttaggaagtaatcttaacaagaggtactagatctttggatccatgatttacttcaatgttgtcaaacttatgttgcacgaaggatacaaattattaacctcagtttttttgtttttaaagaaaaaacacaacagcagcagctcagcccttctgaacagccccacagtaacaacaagctcatgtgcaggggccagtgagaaaaagaaatttttggtaaggatccagattacctgttaaagccaaaatgtacttttaaatctgctactcatgctgcaacagcagaattcacttcccagacaagttgttttagtggatttgtaaaaagcattggttacccgtgacctgtgttcagtgcttctagtcaccatttctcacaacagtattattcataaacagcctctatcagtgctgtccaataaaccttctgtgatgacagaaatgttttatatctctgctgtccaatgtggttttgtagccactagctacatgtggctgttgagcaactaaggaactaaattttaaattttatatcattttaattaatttagacagccacatgtggctagtggctattgtattggacagcatgactttatgcactatgtaagggactgttgatttattgggcaagaaattatgtatatgcttggagatgtgtagatattcattggtatgttcattccttacacacgtcatgagtttctgtacattgtgataagctaataatgggaatcctacctaagatttctgttttaggaagaatgtgaagatgtggaactagaacagctgtttagaaattgaagctcaaagttttatgttaatatgggcaaaaggggaaataaaatgctaagatagcttttcctcttaatgaagtcaaggttatagaatggcctgtcctgggaagtgtagcagatgttttgcttctgaccaagagggatattcttcagcaaaattctgaaagcagaaaaagacaaagtctcagcaaatgcatttctaggaaagatagggtaagaggtagtgcggggaagatgttggggagaggtatttatagcctagtataatgaaaggagcctggtgatattaataatcatttaacatcggattttataattcacagagttacacatttattattattattgtagtttttgttagcctaggcctgagatagaatgaaacagttttcttcattaccagttcttctgccagaaagtccatgcttaggaagagagaggaatgaaagatcaaaacctaatttaaatggtgaagagttgccaaatttggttaagaaatgtctaattggattacagattcaaattacagagtcccagttgaaagaagctaagcattttggctagctggaaaggttgtttattcaagggtggaatggggctggcagaggcaaacagcctttcactatgagaatggcagtgctggctacaaggcagagtcgagactggcacagcttcatggagctcaagcttggcccagcaaggaaagccagaggagctgtgggttcattaacaggattgtttgggtgccgaggcctggaagaactgaaaaatctaatttaatatctctgcttagcaagacttgagacatccttttccctaagtaaacaagcttggtaagtaattgaaaaagagaatggatttgagaacaaataggcagctatggaagtacatgggcagtgagctattaacaattttctaggaggtagattctgtattctctgtattctaggagtacagagaatactgtacactaggagcatttgctgtattctcccttttgtatattgggtctctggaagcctacagcgtggttagagctgactgaatattcttagatgtgtggcacatcctacgtgtggctgggtcctatggatagttttgcaggccatgatgtgcagtgtccctttagcagtcattaactcacagtgagttatcaatgggtgttagttctctgtgggtctgacaacttagtatagtgaaaagagtgctggcctgtggctgaacatgctggagaagagcttgcctggccacagggacacagccacgcagatccagcatgtgtctcccatgtgccaagtggagcccccagccaagaaggcagccacactagcagagggtgacaaggacaatgacattgacctgtttgtcagcgacaatgaggaggaagacaaggaggcagcccggctgtgggagaagtggctgaggtggtatgtggagaagaaggccaagaagactgcgttggtggtcaagtcctccatcccgctggacatcaagccttgggacaatgagaccaatatagcccaattggaggcctgtatgcgcttcatccagctggacgggctggtctaggggggcctccaagctggtgcccatgggctacggtatccggaagctgcagattcagtgtgtggtgggggacgacaaggtggggacaaactttctggaagaggagattaccaagtttgagagcgtgtgtagagtgtcgatgttgcagctttcaacaaggtctgaagccttagagtgtgtgtgcgtgcatgcgcacgtgtgcaagtgtgtgaggccctgccactattaaaaactgagaccaaccaaaaaaaaaaaaaaaaaaagagtactggcctaggagtcatagagttgttactcatctattaatgtaggattttataatttatagagtgctttcaacaacagttaacatcaatgctataagcatgtgtataaggtttacacagcttttacacaaaggtattgagtagaggcaggaagtaaatccaagccttctgattcctagtcaccgtaattttaccatgtataagtcatataacctttctgaagtgagtttttccatctgaaatatagacttaatactcactgtgtctacctcttaagattgttgtaagatcatagacagaatgtgaaatattttgtacattgtaaaacaaatgtacaaatgtgaagttgcagtggttatgtcacttcttatgttctggcactgcaggtgtgagctttggggaaagcttctaactacaactgtccatagtgttgtggaactgaaaggattaaggtttttctctctttatgggattatcattactgtttatctgatgatctttgcaaatttctgaagctagcctaatttctgaaaatcccagtggaggaagaaatggaatccttatttccatggattcctgtttcccttgaatcttatcaaaatggtaggtagatacttgaacagagtctgggctctggatctaaccctccagatgttcatgagtgggtgcttcagaacagaaaagctgctttcttcatgataggcacaagcagggcagggccttggctatcatttctagaggaagagaattccaggatctgttcccccagcagggtcagtgattgagcagactgtcttttgctttcagtgtgaaagacctggctcttcaggacctcccttctctttcaagggttgttgataagatgggctggccagtttgaaaataagatataaaacaacacacaagcctggcattatattttgtaagaagattgctttataatcgtctcttccactgatctcctacaactttccagagtcatgcttaaaaataaaattttaatttttgttgtatttttttttcctttcattcacttactctctttggcaaaataaggactgcaattccagaaatgtggggaggcatcaaaggtatgtagcaaatgcagggagagaaatcagtacagaatcagagcgaggataagaagaatgatgggtaactgaggcctttttcaggtcaagttagttcataaacctttggttaataaatcctgatttttctggattcttgaaagctttttgggctacatgttcagctgttgagtccagactttgagaaggtcatttctgctttagtgttattgtcagttattcctgttgctcctgctgagtccctgaatctgtagctcaacccgacagcccgcactgtctctctcctgagcgtggctgtcactactgctctcaccggattgcctgtggtggggaggggacatgaagctgcttagacctgaatttctgtactagaacttttttctcagtagctgacacctccattcagtttaacatgtgcctatggtcacgcttctcagacacacaaaagaaatgtatgtcggtcaggagtggtggctcatgcctgtaaccccaacactttgggaggccgaggcaggcggatcacctggcctggccaacgtggtgaaaccctgtctgtacaaaaatacaaaaattagctgggcatgatgataggtgcttgtaatcccagctacttgggaggctgaggtgggagaatcgcttgtacttgggaggcggaggttgtagtgagccgagatcactgcactccagcctgggcgacagagcaagactccatctcagaaaaaaaagaaaaaagaaaggtatgtcatattccctgtaccccaggaatcatgcagtcttactgggaagtgaggactacatgaaaaaaagaaagtatgatatgactatgcctcactgtgtggtacagagagtaagtgctatagaaggccaggaaaatgaaagatgagcctgggccagaggagctatggagtcatttcaggtggaagggcacttgaactaggctgtgaaggaagtataaacagttaggtagaacggaggaagggtggcactccaggtcaggaaacagaatgattaaaggcctaggggaagaagcaaacatggcttgtatcaggaaacaaggtgagctttgatctggctttaaaggggggtccctgtggggaacaaacagtgtgagatgatcaggtaaactgaatgagcctaaatcccagagggctttgagtgatagcagagaatttagactttattccatagataatgggtatcactgattaccttatgaacaaagaaggaacatggtgaaaaaggtgattgagatggttggaactgtagaggaacgcagagtgggttggaaatggggagctgaaatgtatcctcactctgattctgtactgatttctctccctgcatttgctacatacctttgatgcctccccacatttctggaattgcagtccttattttgccaaagagagtaagtgaatgaaaggaaaaaaaaatacaacaaaaattaaaattttatttttaagcatgactctggaaagttgtaggagatcagtggaagagatgattataaagcaaccttcttacaaaatataatgccaggcttgtgtgttgctttatatcttattttcagctttatacatttataaatgtataaagatataatgctttatatcttattgactctgggatcaaggggaaagggtctcactgaaggtgatgtcagggagaatgggaagcagagtcttataccggaggtctttgagaggagaattgaaatttgctccctggctgtgaggaggaaaaggaaggaaagaatcaagcattactcagagatgtaactgtgtagctgggagcacagcagtaccaatgttagaaatagtgacactgagccaggcatggtgacatgcgcctgtagtccaagctgcttgggaggctgaggcaggaggatcacttgaacccaggagctcaaatctgtagcgcacagtgattgtgcctgtgaatagctactgcactccagcctgggcaacatagcgagaccccatctctgaaaagaaagtaatagttgagaagggagactagtttaggagagtagttgatatagacacatatggctagattgagtttgagattacagtgggaaaaaacctcaagagtgtgtgaggtatgtgtatgtgtgtacgttgatttttgcaggtccataatctgttatctgcagttctgagatccaaacagtactacaaactaaaggggtatttttagtttttagtttctatttattattttttaatttgtagcagactcatttggcaaccagacctgtcctgaatagacacagggcaatttatggtctttctttattctacttattgtgaatattcatacttttcattgcaaaaattaggatagcttcgataaaaagcatgtactctgttaacaaatagactccaaatctcagtgatttaacacagtattcccagtacaaggagggggagaacagtgttgcccagagttacttaggaacctggattgagggagactcctctgtcctaggacatgtgcctgccagggaagagagtatagaacttgattctgttcctagctcttggtcagaactagggacaaaccccccaaactaacttttaagaggtccaggaaatacttgagcattctgcctctaccacagtagtactgtctcagacaccccccactccactgcctggggaggcatcacatgatttatagaacatctaccatactacccctctaaatccaaaacatgcattctgaaacacttttggccccaagaattttggctaaaggataatagacctgtattaccatttaccaaccacttgtatatcaggtactgttctaatcactttacccaattatatgatttaattcttttgataattccgtaaattggatactatcattctcactttacagatgaggaaactaagttataggttaagtatgaggctgcagtgccattactttttttttttttttcctgagatggagtcttgttctgtcacccaggctggagtgcagtggcgtgatctcggcttgctgcaacctccacttcctgggttcaagcaattctcctgcctcagcctcccgaatagctgggattacaggtgcccgccaccacacccggctaatttttgtatgtttagtagagacggggtttcaccatgttggccaggctggtctcgaactcctgacctcgtgatctgccctccttgacctcccaaagtgctgggattacaaggccaccacgcccagcctagtgcagttaggtttaatggcaaaaactgcaattacttttgcaccaacctaagttcgaggttacacagctaggaagttgtagagccaagatttgaagcaggcagttggactccagtgctacattcttaacaactacatattggcctcagatacgtggcaagcagatgagccttgcttcagtgattggggctacatatagagattgaggaatcatctatttagaggcccactgagaagttgtatgcagagcaggagaaagccagaagtcagaagtcgcaaggttgaggaatggtcatgtgtttggggaggggtgggagagggcatgaacaagaggaaccagcaaagaagcagaagtggtcagagtggtagcaggttccctgtgctgggatagagtcacagaagttggaaatagagttggccacccaccagtgtgaaatgcctcagagaggacaagaagaatggctggccggaaggcattgaatcaaattatctttatctgaacttcccttatctatggcttattatggtcaacctgatgggtgaaattcagatttagggactcagaagatttgggcatatcatgtggttcatggaagcttgtaaggctgtcatggcatcaaagaagcatctttgtttacactgctttttagtcacaggcttggttagtcttaagtagcagtgatttgtggtttggaacaaaagtttaattccctttctgaataaattcatgtagagcagtgcttaggttatggctcgttatgaaataaatttagttccttcatttccataaaggcactgaggagattccttcattagtatatctaaatataatgttgtcccagggctggggcagtggctcacacctgtagtccaagcactttgggaggccaaggcgggtggatcacttgaggtcaagagttcaagaccaacctggccaggggtgaaaccttgtctctactaaaaatacaaaaatcattcaggcatggtggtgcatgcctgtaatcccagctacttgggaggctgaggcaggagaatcacttgaacccaggagacagaggctgcagtgagccgagatcgcgccactgcactccagcctgggcaacagagtgagactctgtctcaaaaaataaaaaaataaataaaatgttgtcccagtttaagaatgaaagctgttatgtgtgtgtgtgtttttaacctcgtttttttgttttgttttgttttgtttcaatatatttttgagacagaatccttgttctatcacccaggctggagtccagtggcgtgatcatggctcactgcaacctcaagccccccgggctcaagcaatcctcttgcctcagctttccaagtagctaagactacaggcgtgtgccaccacaaccagctaatttttgtattttttgtagagatggcgttttgccatgtcgcccagactgatctcaaactcctgggctcaagcaatcctcaaacctcggcttcccaaagtgttggggttagaagcgtgagctaccacacctggcctaaaacttctaaaaatgaaaaaaaaaaaaaattaaacaaaaacaaaaacctgaggaaatatgtgagtaaactatggactttagttgatatatcaatattgattaattaattgtaacaaaaagaaatataccatactaatgtaagatattaataataggggaaactggctgggtgtggtggctcatgcctgtaatcccagcactttgggaggctgaggtggacagattgcttgagcccaggagtttgagactagctgggcaacatggcaagaccccatctctacaaaaagttacaaattagcccagtgtggcgacatgtgcctgtttgtagtcccagctacatgggaggctgaggtaggagaatcaatcacctgtgcccgggaagtcaaggctgcagtgagccgtgatcgtaccactgcactccagcttgggtggcaggagtaagaccctgtctcaataataacaataataataataggggaaactgtacaaaggggagaaggatatatcagaactctgctctgtatgctcagtttttctgtaaatgtaaaactcttctaaaaataaaatttattaattaaaataatagagctacagcaaggtatgctgggctgtaggcaggaacaggtaaaaggatgtataaccctcccacaggggcagacaggactacaaacttcatagagcacttgggatactccagatccagttgaggaaatagtgtgggaagctggagaccacacatcagagcatggcaactctgctttagaggactcttgtcatggtaactgtttagaatttcaggggaacgagaaaaagaagatagtgaaaaactgctctcagtgcctgtgtgacacttaagttgtagcatagcatggtagttaagagtcaggcttccagggttcaaatcctacctcttcctttacaagcgatatgacctgaccttgggggaacttacttaatcttattgtaactcagttattttctgtaaaatagggataataatggtacttgttttgaggatcagtttaattaatatatgtaaacatgcttagaacaatgcttggtttgtggtaaatgctcaataaacgttagctattatcattattattaatggataaagtggtccatgtgttatcttacaggataagaaggctatatcagggctgtatattttttgagacagggtctcactctgtcacccagactggagtgcaacagcattgtctcagctcactgcaacctctgcctcctaggttcaagcgattctcctgcctcagcctcccgagtagctgggattacaggtgtgcgccattactcacggcacactttttgtattttaagtagagatgaggtttcaccatgttggccaggctggtctcaaactcctgacctccagtgatctgcccgcctcggcctcccaaggggctgggattacagttgtgagccactgtgcctctggcctttaattgccattttaaatgaataaagtaaattttctcagttttaattttgaatatggtaaataccaatagatataatccacataagcaaaagctctttggggtctttaataatttttacagtgtaaattagaaccactcttgtaattcattgaactggaagagaagtctagtcccttaataccttgggaaaagggagtcctttaggcatctacccttcctttcaaactcactcccttttctgttgtctgtttgctatgtgttcctcatcttcaaatactcttaagtcctctttcttccaagccacagcctattaatttgtcttcttcaaaataatttttcttcatcgactatgacttcattctctcctttatctctattatttgctggtttcctgcccatcttacctttcttttcctctacacctgttcttctgtaatatctctctcctttccctgtcattttttaaactccctcaagttgtttgtttgcccttttgcaatatctcttcctctttaatttgttctttgtcattttaacatttctacttcctcttatttctcatatttatacttctgttcttcaattcattcaaccacttaacaaatattattaagcacaaatattatatgccatttcctttgcctggcactggggatatagaaacatgatagacctcgggaggccgaggcaagagaatcgtttgaacccgggagacggaggttgcggtgagccgatattgtgctactgcactccaacctgggtgacagagtgacactccgtctcaaaaaaaaaaagaaacatgatagacctgatctctgctctcctgcagtttacaggctactcatgatggtcattttggaaaaggctgggaacagtgtataagatcctactttacccccagtggggtagctttgggagggttttgggaaatcaatgatagtggtaccagtggcagcagcagcaaaaaccaaatattgcatgtctattatgtgtcaggtattttacttacatttagttgttgtaagaactctgcaaggtatgtttaggcttactctacagatggaaaaactaagactcacagaggataagtaacttgcctgtggtcatatagctagaaagcatcagcagcaaaatttcttttttgtcttcagtcacatcagccaacaaggaaatgtatcctggtcaggaggtgatagagtgggagaaacttccagagccaattgtagaaatagggtgtgtatgaagctagaaacagcatgtcacagcatagcaactgagctgggcagccacctagggatcttaccctaagagctttgttgtccctgatgttagaactggaagttttaactcattggaaaggaatgcccatgcccatctgggaagagaagctggaccaggagccatcagggatgtatgcctaatgttgctaacgaactgcccaaggcttacttggcaatggcaggagtgacacattccagagaattctctaacctgtctatcattctttttggcagagtgacgtcagaatcaagttcgagcacaacggggagaggcggtaagtctgccttctgatgagtagctgtgttcatgtatgccaaagttctcagatagcattgagttcatggaagtcattcccctgtcctgatccctgtggggccactggctgggtaatagggtggattgggcataaagggaggaaagtttcacccttgtcttggcctactaattgaaccttgttcctatcttagcattggaagccatttcaactgctgatgttttactgttctgctctattctgctgctgtgaggtctgacattttattaggaagtgaggactctggccctactcagagtcatggctttcagacacactgacactgtgtcacctgtgggcattagagggagggcaggattctcctgtgatatggtgccattactattcccagtagagcagccctggctttgtccacatcaagggtcaggttggtgaattagaagtttcttcatgatgtctctaggtcatgggaagctgcaccaagtccatcagttgtaaaagactttagctcctttgaggacatagaaagagggagtttttcggtctgtgttctgaatcttacctcattagggaagtgaaagtagtgttacaaaactcttctgtccttttctccattgtcagtattttcattattgttattttttgtgggaagccaaggtagaagttctcagtagaaaaaatgtgactgtacttaatttctgaagttatttaaggaaaacattcagaaagcatacagaactctggacatgggatatttgggaccttgcatgtttgtgcatgtgcggcacatgtacacataaatgtgcctttcggtgttttttccactctttgcctttctttcccattgatatactaccccctgccaccctcagctttcctttgctttgagcatttggacaggtgaagagcatacccattagtatgaggtcttcctactttaagagtctcaccacaggaccttagtacctctaaacattcttgattctggtagttctctacagttggtacctttcagcctactttgcagctggctccagaggagacctgtggctactattctccctttaaaatacacattcacaagcctacaaggttgtcagaggcaacccggtggaagcattgtggaaagtgtggtctgcagagccagggtccttctgctcctatgtgagttccaggcctggagggaggaaggtctgagctctgtccccagctgctcttcctgtgtcctgccattagcagagaagttaaattgtcacttcactgttgctacttttcacattttccaacctgagttttaaagggatggccaaactcagagcagcagagttttcaatcaaaagcacaattgtgttggagcccaattacgcagttaggctctcctgaattccctgttcccaaagtggtatgcagttacagtgagcaggcttacactgagaaagtgtatgtgtttggtttcagagaagctgccagattgaaaccacaaatatttaaggtggtcaggcaggaatggccttctgaagccctgagcagcagaacgttgcttatcaaggttttgaaaatggtgcattctctttttacggagctgttttcaggagccatggcatttcagtgtttgtgtactatatgtggaattgaggactttataaagttggtgcagggaagccaacagagttagtactctgtgccacacagctctagtttcgtgtatttcacgtcaggattttgtagagaatgtcattatgggcattttaaactttttacctggaatatgggtagtatttatctaaatgtaggcccttatagaattagaattcacaggaaagaggaaagaagtcatgacttttcccacttatccatgacaggtattcattctggtgggctgactttccctttactttgagaatatggggaccagacccctgactgtcctcccttttggccccaggagggctggggagaaggattgtagattaagatctccttccctttggaaatgttaatgacacactgatgggggtggttgcatgggtgttagacctctctttgaagcactggcctaaaaatgcctgttattcaataggatggcagcagcttagatcttacccaatctggaagtcctggcctctgatcttgaccagactttcaagctgcttttgtgggttttgaatggctcattgctaggccaaatgcagaagaatttatctctgatcatgatcctttttcaatagtgtgctagggacatctgagtggacttctggtattttatccagaaaggctggacccttttgcactgttgctgaggccttgaagaaggaggggtatgatttgctattaggcattaatagaaagctatcctctcaaaaggcttcagaaacacctctatctagagaatccatctagatagcacctaacagtatcactgcttgggacagttgatttggaagaaaaaaatataagaattacagtctgggccgggtgtggtggctcacgcctgtaatcccagcactttgggaggctgaggcgggcagataaaaaggtcaggagttcgagaccaatatggtgaaaccccgtctctactaaaaatacaaaaattagccgggcgtggtggccggcgtctgtagtcccagctactcgggaggctaaggcaggagaatcgcttgaacctgggaggtggaagttgcagtgagccgagttcgagccactgcactccagcctgggggacagagcgagactccatcacacacacacagaaaaaagaattacagtctcaatgggtttcctagtggagatgaaactaatttggttagcagtataatttccaaaaatgaaaggtggtgatggacaaaggaaaaaaacaggaaggaattaccttcttgagatgttaggctttgcgtgaaggatagattatggtttatattaatagtctatcaatgttgccctgtagaactttctgctataatggaaatgttctatatctgtgctgtccagtacacatatggctgctgtacatgtggctaatgagcacttgaaatgtggttggtgagacagaggaacctttttcttttaagacagggtctctgggccaggtacagaggctcacgcctgtaatcccagcactttgggaggctgaggcaggaagattacctgaggtcaggagttccagaccagcctggccaacatggtgaaaccctgtctctactaaaaatataaaaattagctgggtgtggtggtgcacacctgtagtcccagctactcgggaggctgaggcaggagaatggcatgaacctgggaggtggagcttgcagtgagccgagatcgtgccacttcagcctaggcgacagagcgagactccatctcaaaaaaaaaaaaaaaaagtagacaggatctctgttgctcaggctggagtacagtggtgtgatcgtggagcctccacctcccaggctcaagcagtcctcctgcctcaacctcccaggtgcctgggacaacaggcacactgccatagccaggtaatttttgtagagacagggtttgccattttgcccaggctggtttcaaactcctggactcaagctatccacctgccttggccttccagagttctgggattataggtgtgagccactgtacctgttcaggaaccaattttcagtttaatcaatttaaatttaaatagtcatatgtggctaatggctgccatattgaatagtgcagatgcagttctagatgatgaaggcttttatgcttctcactgatttgagccaacctgttacagaagaacattaaagaaattatctggtcagattttattaaaacccaatggtttagatccctctctcttgtggcttattgcttcttcctctggttacaccacttcccactctgggggagcagggaagatgagaaagaaccacacacttcttcctctcagcatggaagaggacaagaactgcgcaggcccatggctgaatactgcttgctccaacacacactagtctgattttatcctgcttaggtgtactaagagatgaaggttgttttaataggcatttctccagtcacattgggcatcttttcatgtgttttattagccacttacaattcttctgtgaattgtctaatcttttgccttttctattagattgtcttttattgattttttacaagtattttctcaaagtttgatatttgtttaactttgttgatggcttattttgcaatcagaagtttatttatttatttttttgagacagagtctcttgctctgttgcccaggctggagtgcagtggtgtgatctcagctcactgcaacctctgcctcctgggttcaagtgattctcctgcttcagcctcccaagtagctgggattgcagggcatgtgccaccacacccaggtaatttttaaatttttagtagagatggggttttcccatgttggccaggctagtcttgaactccggacctcaggtgatccacccaccgcagcctcccaaagcgctgggattacaggcatgagccatcttgcctggcttgtcttctgtattttatgttatggttaggaagaccttctctctctctgtctcttatagagagagagagagagagagagagagagagagagagagttttttttttttttagacagggtctcattctgttgcctaggctggagtatagtggcatgatcacagctcactacagccctgatctcctgggctcaagtgatcctcccacctcagcctcccaagtagcttagactataagcatgtactatcacacctggctaattttttaaaaaaatgtttagtaggcaggagggctcactatcttgcccaggctgatcttgagctcctagcctcaagcgagcctcctaccttggcctcccaaagtgcttggcccccaagatttttttttaattctgtattttcttatataaatttgagagtatgtgtgtgtatgagtttctttcttatattcttttcttcagttatctctgattatttttagtcatttctgttctagagtattgggttgaacccatataaaattgccacttttatatatcaaaaatggtcggccatcagtagtctcatatagttcaacctaatacattcattcaaactttttattggccaagcatggtggcttacacctataataccagcactttggaaggccgacgtgggaggattgccagagttcagaggtttgagatcagcctgggcaacttattgaggcccatccctacaaaaaataaaaaattagtcggtgcatgccagtagtcccagctacttgggaagctgaggcaggaggattgcgtgagccccagaggttgaagctgcagtgagccgttatcattgccactgcactccagcctaggtgacagaacgagactctgttttgaaacaaacaaacaaaaaaaccccacaactttttattatggaaatttcaagcacacacaaaagtagacagagtattaaactgaactcccatggacctgtcacccagcttcaacattactaacattttcccagtcttgttttatcaattcccacttttaaattttgctgaagtatttaataacaaatcagattttacacctctttggatgactccttactctaccttatatttgtagaaattgttctttgaactgacctaatgagtctctccagaaaatcttcaatgtcaatactagttacatgcacagatatgtcactggttaagaaaactgatcaggcatatcactaactcaagggggaattcctgtgactctgtagtagaaaatcttaattctgaggaaaatcagtatggagattcttatggcatctcaaagatgaacgatggaaaagacctttcaagtcctagagttgagtcccttaggagttgaggccatgttttcaggactgctactccagtctgtacgttttctaccttatttcctaaataatttttttctttcaacttttatttaagttctggggtacatgtgtaggatgtgcaggtttgttacatagttaaacatgtgccatggtggtttgctgcacagattaatccatcacctatatattaagcccagtatgcattagctattcttcctgatactctctcttccccaagtcccaacagccccagtgtgtattgttccccctccatgtgtctgtgtgttctcatcgttggaacatagtttttaaatctagtggcctcttctgtcattggcagaagagtctaagctgaagtggtagatgaatggttgggattgagcaatagttgtgggtactgttgtcaaacctgatagatgctcagagggtgaaaggtaacggtagagaagaggaaaaaaggaaacaatcgggaaaaggcaaattgagtgaaagaaaacagaatcctatgttgagaagaaaggaagaatatactcagaccattgctttttaaaccctacgttttaagtatacaattaaccaacctttctttctgtttcttttcagaattatagcgttcagccggcctgtgaaatatgaagatgtggagcacaaggtgacaacagtatttggacaacctcttgatctacattacatgaacaatgaggtgagaaggcagatggatggggcagggacaagaggggcagatgcctaccttttttctctctgtttaccagagcctttaaagtttgttcctctaatatcatctgcaggttttcattttctagacccccttttcttaattccaacaactgtgggatctctgttttttactacatgggagattactcagccatctcagccatctccattccccctactcattcagtgcagatagctctaatattccatggtggaatcaggtatggtaccagggctagggcttatactgtctcctttacattttgtaggagtatcttatttttttccccccagcacagccttaacaagaagcagagggtttagcaggggctagggaggtgtgaaaaaccagtgagtaggtcatctattacagtcataaatgcaggattcttctcttagagtttcttctgattggagcttatttgtttcaaatgttagcacctgctccaataagttctttaactcctcctcctcctcactccaccccaacggtccttatttacttctactttgaatatcacccaggaaggaattcttttgaatgtcagtttctgggctgctttcccagctccaagaagaatattacagactacaatcagcttaggctggtgctttgcagtgtatttatgctgagtaaagaatgtgtacctcgaggaaattgagttaggggtgcaagacaagaaagctgggcaacatcatgaccctttgagaaccagatcatcactgtgtagttttattttatttgatgaggagttaaaatttttcttttagtaaagacttttctgaatcatttagtactcttttctttttcagttaatatttccattaagaattcctgatgtttctttattctaaagccaaatataaatcattgttattattttagttcatacatgtcttaacatactctactaatgttaatgatcaggagttgactaacttacatttgattaatttaaaatccctcaattccgttcttttgtttgccctttaaaccctgcactgtcaagatctaagaatcccaaatgaaaaatctactgagattttatttatttatctctttgtaattatagttttattgagattaaaaaatttatcatctaaaagtataccattcagtggtttttagtatgctgatagagttgtgcaaccaacaccgctatctaattccagaacattttctttttttttctgagacagagtcttgctctgtcgcccatgctggagtgcagtggtgcaaacacggctcactgcagccttgacctcctgcgctcaagcgattcccccacctcagccacccaagtagctgggactacaggcacacaccatcacacccagctaatttttttgtattttttatggaggcagggtttcaccatgttgcccaggctggtctcaaattcctgagctcaagcgatctgcctgcctcagcctcccaaagtgctgggattacaggcatgagccaccgcacttggcctccagaacatttttatcactccaaagagaaacctgtacctattagcagttattcccctttctctcctcttctcagctcttggtaagcacttatctttctgtctctttggatttacctattctgaacatttcgtgtagtgcaatcatacagtacgtgaccttttttgtctggcttctttgactaagcgtatgttttcaacggtcatctgtgcatgttgtcagtatgtcattctattttatggctgaataataaatattccatttatggatataccacattttgtgtatctgttcatctattgatagacatttgggttgttttcattttttggtgattaaatagtgctgctatgagcatttgtttacaagtgtttaaatgaacatatgttttcaattctgtaaggtatatacctaggcgtggaattgctgggtcataagataactctaactttttgaggaactgcccagattttctataatggttgcacaattttacagtcccactagcaacttatgagtgtattagtctattctcactctgctgtaaaaaactgcccgagactgggtaatttataaaagaaataggtggctaggtgcagtgactcacgcctgttaatcccagcactttgggaggctgaggcgggcagatcacgaggtcaggagttcgagaccagcctggccaacatggtgaaacgccgtctctgctgctgatataaaaattagctgggcatggtggtgcacacctgtagtcccagctactcaggagcctgaggcagaagaattacttgaacccgagaggcggaggttgcaatgagccgagattgcagctcatttgagacagagttgagactctgtctcaaaaaacgattaaaaaaaattattttattttatttttaaataaacaaataaaggaaagaggtttaattgactcacagttcagcatggctggggaggcctagcaaacttaacaatcatgatggaagggaaagcaaacacatccttcacatggcgacaggagagagaagggccaagcaaatgagaaaaagcctcctataaaaccatcagatctcgtgagaactcactcactatcaggagaacagcagcatgggataaccacccccgtgattcagttacctcccactgggtccctgccacaacacatggggattattggaactacaaatcaatatgggatttggatggggacacagccaaaccatatcagtgagggctgcagtttctccaccatccttaccaacatttgttattttcttcttttaatagccatcctagtaggtgtaaagtgatatgtcactgtgagttttgtttttgtttttggtttgagacagggtttcactttgttgcgcaggccagagtgcagtgtgcaatcatggctcactgcagccttgacatcctgggttcaagtgatccccccacctcagtttccccagtaactgggacaataagcacatgccaccacactgagctaattaaaaataaatttttgtagagatgggggtctcactattttgcccaggctggtcttaaactcctggcctcaagtgagcctcccgccacagcctcctaggattacaggtgtgagccactatccccagcctacttggttttttttatttaactcccttcccaaccattcttatttattcccactttgaatgtcacacaggaagaaattcttttgcaatataatatgatttgcagaacattctcccattccataagtagttttgagattttattttaaatatgtactgtttttggcgaggcgcgatggttcatgcctgtaatgccagcactttgggaggctgaggcaggcagatctcttgagctcaggagttcaagaccagcctggacaacatggtgaaaccccatctctacaaaaagtacaaaaattagtcgggtgtggtgcctcatgcctgtaatcccagctacttgagaggctgaggcaggaggatcactttagcccaggaggcggaggttgctgtgagccgagattgtgccactgcactccagcctgggcaacagagggagatgctgtctcaaaaaaaaaaatcttgtattataaattgggaactgtgtaagttaattggacttttgcttgattttgtgtttaccatacgtgtataaaatctgaccaggcgtggtggctcactcctgtaatcccaccagtttggtaggctgaggtgggcagattacttgaggtcaggagttcaagaccaacctgaccaatatggcaaaacccagtctctactaaaaaaaaaaaaaaattagtggggagtggtggtgtgcacctgtaatcccggctactctggaggctaaggcaggagaatcacttgaacccaggaggtggacattgcagcaagttgtgattgtgccactgcactccagcctgggcgacagagtaagactctgtctccaaaaaataagaagaataagaataagatctgacatttgctaggtcctaagcaaggcatacgtttgcatcttatgaatctcttaataccaagtattcataacatgctctgctttttgcagtgagtgagacttatttgtaccctcagggaccttctatttaatatttcactggaacgtatgagtgtattagtctgttctcacgctgctgtaaaaaactgcccaagactgggtaatttataaaggaaagaggtttaattgactcacagttcagcatggctggggaggcctcaggaaacttacaatcatgacggaagggaaagcaaacacatccttcatatggcgacaggagagagaagtgccaagcaaagggggaaaagctccgtgagaatggaggaggtagttttcaggttctagtcactgactttgcccttaaacagaaagataattaaaccgtgctatgcagtctaaatttgtgtttttatttgtataacaattttcatcctctgaccatccctccaccccttctcttccttttctgcttgttctattaatgtcagcacaattggcagtagagtgggacatgatcctacttaatttggaaaagaatatgggggctgtaactgtttgcaacttgatattttgaagtaaattagtgtttttggagaggcagctcttctcagaaagtatctcacaactgggtactgaggtatgctacagcatggatgaactaaaaaacattaagtgaaagaagctagatgaaaaagattgaatctttatgaattgaattgaatatgtatgaattgtatgagtctaaatggaatgaaatgtccagaaaaggcaaatcaatagagatagaaagtagagtagtggttgcctggggctggaggtgggaaggaggagtgactataaatgggcacaagagatcctgttggagttctggaaatgttttaaaattggattatgatgatggttgcacaactatgtaaaggtactacaaatttttggattgtacatttagagaaaaaaatctgtatggtttcaactagatctcttaagaccccatagtatccagtgagattgttttcctccaaatgtatttttattttttgtttattttatttctgcaaagtgaaacattgagataaacttctgttttatattattttccttttctatgtcttgtatcacagctctccatcctgctgaaaaaccaagatgatcttgataaagcaattgacattttagatagaagctcaagcatgaaaagccttaggatattgctgttgtcccaggacagaaaccatgtaagtagcccttgtcatggtctggcagctgaagacaaagcttgctttccttcaggaacttgtctcgcctccttgacagacattttcgttcctcagccactgccaaattgagagcataagcacagcacagcccacttgtcagtggccagtgaacattctgcatttgatttcaccgaaaagccagattgtcagtgttaacattgcatctaaaggttatttgacttttggtgagggaggaaggaaaatactttatgataaagaataaaattcttgtgctctaaatttatgttttttcaattagattttgaccccaacaagagaaatttgattcgtttggcagtgccgattaggaaagactgtcaaagatttgagactgtcatgctttataaacccaactcccacaacaccttgcctttcccttggaacacttgtaggaaacaaacttttccttttgttcagtggaaaaagccatgggttgggggcctcttataacttatcagctgttgctttacccaatggcaggcagtctgtagggtgtcagaagtggggaattatcccttatgcacagtttcctctcctgaaggattcctggaggcccgcatttcacaagaatgcttgcaatctgtatctgtcttccaattactgattcttctaccagttttcttcagatgcatgtttctgaaggtttcttggcaccatttccttttcttatgcttgacaggctttccttttctttatgtggacagccaacatggcagcataagtgtgggtgtagtgactaggacaaagtttaggtggaatgctgctcatgctgaccatttcttttctttttttttttttttttgagacagagttttgctcttgttgcccaggctggaatgcaatggtgtgatcttagctcactgcagcctccgcctcctggcttcaaatgattctcctgcttcagcctctcgagtagctgggattataggtgcccgccaccatgcctggctaatttttgtattttttagtagagacaaggtttcaccatgttcgtcaggctggtctcaaattcctgacctcaggtgatccacccgcctcggactcccaaagtgttgggattacaggcgtgagccactgtgcccggccattttttaatttttttagtagagatggggtctcactgtgttgcccaggctggtcttgaattcctgagctcaaatgatccacccactttagccttgcaaagtgctgggattacaagtgtgagccactacacccagcctgtggtgaacatttttctatgttgtaattataatttgtaaggatacatgtttctcttgagtcgatataccataatttaattaaataaccatttttgctactgttgggacacagaaactgctcctgttttttgcatttataaatatttacatttaagagtaacaatggtaatgtttggtgatgaaatctttcctccagaacttcctcacctagactttaggcttcttaataaatggaagaattatgatccaaaattgctctgtgctcaggaatcctcacctctagaacagtgttcctctaactatatgtgatgaaatatcagttttgttcttttgatttcaaatctgtcatggacttttttttttttttttttttttttggagatggagtctcactctgtcgcccaggccggagtgcagtggcgtgatctcggctcactgcaacctccacctcccgggttcaagcaattcttctgcctcagcctcccgagaagctgggattacaggtgcacgacaccacgccccgctaatttttgtatttttagtagagaaggggtttcaccatgttggccagactggtcttgaactcctgaccttgtgatccgcccgccttggcctcccaaagtactgggacaggcatgagccactgtgcccggccgtaccagttctttttttaaatacaaaaactgagaagtgaaatggaaaaataaactagaggtatataaattataaggctacagttttcattagtagattcaataaacataaaatcactctgccaaattgctctaaagtttttcaaagggccctctccatttctttacttacttggtggaagagcaggacgagcagtataccagtgtgtggactggcaccagcccagatatcataccttaagtacactgctccaggatactatatcacctggtcttcatcacctccgctgatactgtcagtcactttgtttctccactttgaatttcctgcatttgtagcagttgcctcaccgccttttgttaccacctattcctttatttccctttttttttgagatgggatcttactctgtcacccaagctggagtgcagtggcgcagtgacagctcaccacagcctcaacctcccagactcaagttatcttcctcccatctcagcctcacaagtaactgggactacaggcgtgtgcccccatgcttggcttttctttttttttttttaattgtttgtagagacagggtcttgccatgttgcccaagctggtctcaaactcctgggctcaagcaatccttctgtctcagcctcgcaaagtgctgggattacaggtttgagccaccatacctggctgtttctcttcttgttcctgttttgaattgtgctatctctttcttctctttggattcttcttcttcttcttcttcttcttttctttttttttttatttgagatggagtttcactcttgttgcccaggctggagtgcaggggtgtgatcttggctcaccgcaacctctggcttccaggttcaagtgattctcctgcctcagcctccccagtagctggggttacaggcatgcaccaccacaaccgcctaattttgtatttttttttagtagagacggagtttctccatgttggtcaggctggtcttgaactcccgacctcaggtgatccgcctgtctcggcctcccaaagtgctgggattacaggcatgagccactgcaccccgccttggattcttctgatccctatatggcagcttctaattttccttctgtcttcattcctcacaaggtacatagtcttacctctcccacctcactttggccaaggccatgtctgagaggcctcaatattattcttgagaactcctgagttttggtaatcacagaactatctctttttttttattttgaggcacagtttcactctgtcacccaggtacgatctcagctcattgcaacctccgcctcccagattcaagtgattctcctgcctcagcctcctgagtagctgggattacaggtgcatgccaccatgcccggctaagttttgtatttttggtagagatggggtttcgcactgttggcgaggctagtctcaaactcctgacctcaagtgatccgcacgcctcagcttctcaaagtgctgagattacaggtgtgagccaccggatctggccagtctctttgtctgaaaagcctctctctagccttggtctctaccatcattttaagatacttcattgtctccttctgtagtttttgctgtcctaagcctctgctttggaccaccaacttttagcttatgcatctaacttttacatttgtctttcagctcttgaccttcttaggactttctagtctcagatcttccactgtcataaagtaatatcaagctgaaccttcttttgtaacttgtatttgtatacgataaaaactaaacacctagccactttgttttgttacctcatattcgcgttgacaaaaataagcttctaatcttctcacctaaatattgtaagttaaaaatatcaaggataatttaaaaggtaattcttttcagtccttgtaaaatagtgggacaggtgcaggaagataaaacaaacctgattgggcagaatagcttcttctggcccctgttaaaaataaacactgggccgggcgcggtggctcacgcctgtaatcccagcactttgggaggccgaggcaggcggatcacaaggtcaggagatggagaccatcctggctaacacgtgaaaccccatctctactaaaaaatacaaaaaattagctgggcgtggtggcaggtgcctgtagtcccagctactcgggaggctgaggcaggagaatgacatgaacccaggaggcggagcttgcagtgagccaggattgcgccattgcactccagcctgagccacagagcgagactccatctcatctcaataataataacattgggctgggcatggtggctcacacctgtaatctcagcactttgggaggctgaggcaggcagattacttgagcctaggagtttgagaccagcctgagcaacatggcgaaaccctgtctctattgaaaaaaaaaaaaaaaaaacgaaaattagccaggtgtggtgcgtgcctgtggtcttagctacttgagtggctgaggtgggagaatcacctgaggccgggaggttgaggccgcagtgagccaagattgcaacactgcactccagcctgggtgacagagtaagaccctgtctcgaataatagtaataataacaacacctagcacataaaaagtgtttttatctttcacttgatttttacaactctgagggtaccagggcaggcgtctattatctccagtctacatctggggaaactgagacttagggtgactgctcaggtgaggcagtgtgtagtgacagagctggtctgaaatccagatgttctgacttgtagtctagtgcctgtcagtcaccatccagaagagggaatttttttttttttttttttttttttgggatggagtctcactctgtcacccaggttggagtgcagtggcgcaatctcagctcaccgcagcctccatctcccgggttcaagcgattctcctgcctcagcctccctagtagctgggattacaggcgtgcgccactacgcccggttaatttttgtatttttagtggagatggggttgggcggggggcggtcctcaccatgttggccgggctggtctcgaactcttaaacttcaaatgatctgaccgccttggcctcccaaagtgctgggattacagttgtgagccaccacgcccggccccagaagagggttcttagaattattgtagtccttgggaaacctcacccaggtgcctccacggttggaaatcattagaagccaagcagaaagtataatactgtccatgaggagaacttgtgagatgttgtatcattctgttccctgcagctttgaagacaactgagctagcaaatgtccagaagacaaaattttcaaggagttggagtcactttcatatatgaacagtgtaaaagtttacaatgcttggccaggcgtggtggctcatgcctgtaatcccagcactttgggaggctgaggtaggtggatcccttgaggtcaggaatttgataccggcctgaccaacatggtgaaaccctgtctctactgaaaatacaaaattagctgagcgtggtggcgcatgcccgcaatcccagatactcgggaggctgaggcaggagaattgcttgaacctgggaggcggaggttgcagtgagccgagattgtgccattgcactccagcctgggcgatgagcgaaactccgtctcaaaaaaaaaaaaaaagtttagaactctttagttaggaaagacagcctaagcatatataatcagagtctttaaagcgtttaagagcatggataatgaagacacggatttattcacctaatctcaatttggatgaactccttgaatattgagcattatcttagaacaaaaaagaaataatttgtataacaagtgataaaccagcctgggtaacatagcaagacccccatctctacaaaagttttaaaatcagtcgtggtggcaaatgcctgcaattccacctacctgggaggctgaggcgggaggatcacttgagccaaggaattccaggctgcgatgagctatgattgcaccactgcactcattgagcaagaccctgtctcaaaaacaaaaaagatgatatatgtggcatctattattctgaaattgtgtagcttcaaagcagattttaaaaagggctttaggccgggcgcggtggctcacgcctgtaatcccagcactttgggaggccgaggcgggcggatcacgaggtcaggagatcgagaccatcctggctaacacggtgaaaccccatctctactaaaaatacaaaaaaaaaaaatagccgggcgtggtagcgggcgcctgtagtcccagctacttgggaggctgaggcaggagaatggcgtgaacccgggaggcggagcttgcagtgagccgagatcgcgccactgcactccagcctgggcgacagagcgagactccgtctcaaaaaaaaaaaaaaaaaaaaaaaagggctttaataaattcatggatggtaaagctgtaaatttaattaaatcacctcagatgctttcacagctatcataactatcatggtcttccatgcaaatatctcttggtaccaccattaaaacagaggactggacaggatgctcttggtgatccagtgtgccatttcttaccttacattcccatgtaacaaactaaagcaacccctctccctgcttcacctcttccctgcatcgttgaatccacttgccagattttttattgagataatttgtgggtggacttttgtaacttatttttctactgatctcctatcttccagtcactgaaatcttgatgcacatggtttcctggtaatttttcatattgtttgtgttagccacagctaacttctacccagagtcctttagtgaggtgttcatggaatgatcaaacaccatcttctatttgttgtctttagaatgttctgctagctacacagttcatacctatgggctctcctgtcactctgcgacagtccccttatattctcaggcatagtcccaccttcctccttcctctttttcccacttctgagtcttattcaaggtgtcctaaacccttgaagcaacctcatttttatttaccataccattcccttttgcccccttaaattgaggttttcaaaatttggctgaatattacaaaatgtcagtgcttggactctgtgtccagaggttctgttgatctgaggtgtcaaaatctccacaggcagctgggcatggtcgctcacccctgtaatcccagcactttggaaggccaaggcaggcagatcacctgaggtcaggagttcaagaccagcctgaccaacatggagaaaccccatctctactaaaaatgcaaaaaattagctgggcgtggtggcacatgcctgtaatcccagctactcgggaggccgaccaggctggagtacagtggtgcgatctcggctcactgcaagctccgcctcccaggttcatgcccttcttctgcctcagcctcctgagtagctgggactacaggtgcctgccaccacgcccagctaattttttgtatttttattagagacggggttccactgtgctagccaggatggtcttgatctcctgacctcatgatccgcccgcctcagcctcccaaagtgctgggattataggcatgagccactcccggcctagcttttagattttttaattgagggtttagatagtatgtcctttggtacacatttcaaattcatgttgccatgattttttgaattcccactatgtgtaaggccctgcattcaggcaggtggcagggtgctcatcatgcacctcctctttgtgagtgcaagactatgaccctcccttgcccttcacttgcctgcctccccagtatgtggctttgactgttgtttcctttttgacccttagcagagagctattgcacatcggaggcttcagcaagaacattcacttcccccttggttctgacttcccgttagagcaagacagtttttcaagacaacctgcatgtgataaagtctggcatggggactacaggaggttgcttggcagctgaactctcccctgagagcaggaaacctttttcctggaggacaggatatagagtttgtttagatcggactttttttgttagggggaggtagaggagatagaggagcaagtagaaactttgaaccaacttgtttgtaaatcctgagctctcaccccgactctcaccagtgccctgcttatttgtaatagcatcctgacatcacttgattacctccagggtttagttttaagctttctcagtgcaaaggcccccctttgttgcttagttttctctggcggctggactgggcccagtggaaagagtgggtgggtgctgggaggattgctgaccctcctctcaggcccttgacctctgtctggcacaatggtacttatgatagcttttcccaattgaacatgatcctgagatgatttgtgtgtaaaccctggaatcttcttaattttcagggagtgattattgttgggaaaaagaagcaaattgagctacttttaaacatacatatataagctgggcatggtagcatgtacctatagtctcagctaacccggaggctgaggtgggaggatcccttgagcccaggagtttgagtccagcctgggcaacatagcaagactctgtatcaatcaatcagtcaataagataaatacatatatagcaaccagaattttgttggggagggaagttgccatcattcactctccatcctgacttcctcctctgcagaaataattttctgctactcttcctaaactctctggagaattttatgagagggtatttacagctctcttttctgttttgcagattattacaggaatgcctgttattcctccatgtctggatcatcacctgttaaactggggcactaggtctcagcgctcatacatcattgaagctataaaactacattgagcgaatagtggtttgctgagacaaatagaagagtgagatttgggggaaagctgggtagctcatgtattaaaagcatgaaggtggctgagcctgcagggagtccttaggaaaagggtgagaagaccttgataggcctgactgtgtaaagatgtagcttggcctttttcctcttcttttacagaacagttcctctccccactctggggtgtccagacaggtgcggatcaaggcttcccagtccgcaggggatataaatactatctaccagccccccgagcccagaagcaggcacctctctgtcagtgagtatttcaacccttttttctccccctctattttatctgcccacattttaaaaaagcaacaagtatttgttaattaaataatcatcaaatatttattaactattactctgtgtagagtaatcctttatgcctttattttatttagagaggaagggcaaagaaataactgggatggtatcctgactctcaaggaacttaaaatataatgatatagtagtgtgattaaattccttttaaacatccctgaaaaagtgattgcctcagacatctgcttgaagacttccagctgtgtttacactcacttttgaccattcttgtgaagaatagagacttgtaaagttaggaatcgggtctaagtttgaattttgaccttaaacctcttgcttatgattcctgagaagtctttatacttcagggaagatagtgaccaatgaaacttttgagagagtcaagctaagttgtctggaaggaaaggagactattgacatagtacagtcatttctctgtgtttgtaggggattggttccaggacccctgtggatgccaaggtctgtggatgctcaagtccctgaaataaaatagtgtagtatttgcatataacctacccacatcctccttcatagtttaaatcatctccgggttatttataatatgatgtaaatactatgtaaatagttcttatgctatatttttatttgtatttttttgctattgttattttttataattttccatatattctcaatctgtggttggttgaatccacagatgcagaacctggagatatggagggccaactatatatacaaccctctgctaactagtcagaaagctctgtggctgctaccagtccttcccaggacaggaatctaaatcaggcctgtgcattattacttgttaacccaggattcctgtggattccacttttgggagtctggggagaaagcccccatttcttgaattgtggaacttgtatcaaaagggaaatctggtcttatcaaacatcgtgttgagcctgctgccttaatgttgtggagacccctgctgctgctagaaagccagctttgcccttatccatataggtagaattgcttcaaattgaagtgtcctctgaagatcctgagctgagcttgagagatctaagcactgatcctgttgctgagtttgtctgtttgcaatatgcctcctgagggagttacaggaaaaatatgtttctgaggtactgactttgccttactgagtaacttctggaatccaggcaagtactggtagtaagtattgccaggctgaaagtctgtatatgaatttcagatttctgtagataattggggaatgtgttggttgaggatggagagctagtaccctagcaaggagagcctagccacagcgtctctggccctggaatctgtgtgcctcagagcctgggaagctctgccagtttggcctcttttccgtagtccttgtagagattgaggggatggaggtgggcagcatggtcccttgtaatcagtaaggattgatggggcagtaactgggtctcttgcccccaagcaagagcctatgatatgtgcatggaggcaggggctaaatacttagccactggaccctttctccatgttaccgggagctatatatggaaatgattttcctggctgagaatgctgaggagtgagatttctgtgaagtagttcctgtttatctggaaaatgggcaacacggcctcttagcatacctagatcctggcttccttcattcagcaaagcattaagtaccagctgttgggctgagatgaatgctgcagtgaagcatttgaaagagcaagggtggctggagcagattccgcctgggagagaggggctttcacagaaaaggtaacatcagagctgacactccaaggaagatttactgagcatcaagtagagagagatatctcaggcatagtaaggagcacctgccaggcatgatcacaaaagaacttggtgggttgaagaaccccaggggctttgcactgtgtgtagggtaaggtagatgtggcaagagaatgggctgagcctgtgagcgtttccatagagccaagaaatgggagagatgatttctaactggaatgatctggaaaatgcattctgaggggagctgttccagctggaccttgaaagattgtggaggatttccacaggggacaaggggagagaggagagggcttttagactatgtctgtggagagctcgctattcttcaggtccaggctggctgatacatttggaggaggaatagagaggccaagaaaggatgcctgggtgttttctaagggactctcagctgcactcagactcttttggtaggcagtggaagccactgaaaatgtttgccccttatacccatcaccattataatatttattatgttgtctttttttttttttctcgagacagagtctcactgtcacccaggctggaatgcattgatgccatctcggctcactgcaacccctgcttcatgcgctcaagcaattcttctgcctcagcctgttacaggtgcacaccaccactccctgctaatttttgtgtttttagtagagacgggatttcgccatgttggccaggctggtatgactcctgacctcagatgaccacctgcctcggcctcccaaagtgttgggattacaggcgtgagccaccacgcctcaacctatcatgttgtcttatctttcttccatcatactacgtttttgttcattcattcaaaagataattactggctgggcatggtggcttatgcctataatcccagcactttaggaggccgagttgggtggattgcttgagcctcaggagtttgagactagcctgggcaacatggcaaaaccccgtctctacaaaaaatacaaaaattagccaagtgtggtggtgcaagcttgtagtcccaggtacttgggaagctgaggtgggaggatcacttgagcctgggaggcagaggtttcagtgagccatgaatgtgccatggtactccagcctgggcaacagatcaagaccctgtctcaaaaaaaaaaaaagtaattaccaaagtatctactatgtgccagaaatatgggaagcaaaaaagacacaggccctgtccctgtggcctttacaatccatggaaagacagacatttacttcttatgatgtgattaatgtataattacaaactgtgactgaaaggtgtgtggtgctgcaggtgggctataactaagaaatgggctgggcatggtggctcacgcctgtaaccccagcacttggtgaggccgaggtgagtggattgcttgaggccaggagtttgagaccagcctgaccaacacagtaaaaccccgtcactaataaaaatgcaaaaattagctgggcatgatggtgagtgcctctagtcccagctactcagggggctgaggcaggaggatcacttgaacctgagagatcgaggctgcagtgagtggagattgcaccactgtactccagcctgggtgacagagtgagtgagactctgtctcaaaaaaaaaaaaaaaaaaaaaagaaagaaagaaagaaatggtgggctataactaagggatgggacctgatcctgatcttggggccaggaaagccttaggcatgaatgggatttgggaattaggcaaaagggatgcaaggaagagggttccaggcaggggatgttacaagagcagagacttgatggcaagaggaagtgtggtatgtcagaaatggaaagaagtccagatagctggagagctgggagcaaggggaaggggagggcaggatgaagctggggagggaggcagagccttgtggaccctggttaagattctgatcattgcatggaaagtagtgaaaagctactttagagtttttaagtgaagaggagtgggtgatgttacatattcgtatttgtattttgaaaagattgatctggctacagtgtggataacagattggagggggcaagaatgcatgcaagggaactgcattaggctaatgcagtggtccaggtaaagaaaactgggcttggagtaggctgatgaagtggagagaggaaggagcaggtgaacttgtgacatttagaggtaaaactgacagaacatggcgttttggtggttctcaaagtgtgttctggggatcctggggagtcccttggatcctttgaccctgtgagttcaaaattattttcttttttttttttttgtgacggagtcttgctctgtcaccaggccgaagtgcagtggtgtgatctcggctcactgcaacctccgcctcccgggttcaaacgattctcttgcctcagcctcccaagtagctgggactacaggcatgcgccaccacacccagctaaattttgtatttttagtagagacggggtttcaccacgttggccaggatggtctcgatctcttgaccttgtgatccacctgcctcagcctcccaaagtgctgggattacaggagtgagccaccacgcctggccctcaaaattattttcataatcatgctaagacatgacactcaattctctcacaagggtacaatggaggtttccagaggtcaggtgcctgaggtgatgtcatcaccgtaatggcttaatggcatgtgtgcttgtatatgattgtattcttaaaatttcttttttcctccactggtttctcctgagaaaatgtttttaaaatttctgagttttaattgcaaatacagtaaatatcagttgatatatcctacataaatgaaagctaagtggcctcagttttaaggtacagaggggttctaagaccaaaaggcttaagaattactatagtattggattgaatttgcaggtgttttcaggaggctaaggtgggaggatggcttgattccaggagtttgagcttagcctagacaacataatgagacccaatatcatttaaaaaaaaaaaaatgaggccaggtttggtggctcacatctgtaatcccatcactttgggaggccgagatgggtggatcacctgagattaggagtttgaaaccaacctgaccaacatggtgaaaccccgtctctatgaaaaatacaaaaattagttgggtgtggtggcatgcgcctgtaatcccatctactagggaggctgaggcaggagaattgtttgaacccgggaggcggaggttgcagtgagccgagatggtgccattgcactccagcctgggcaacaagagcaaaactccatctcaaaaaaaaaaaaaaaaaaggaaggaagaaaaaataatttgcagatattgagagagagggaggtaaattactgctttgtggagatgaataaatggcatcgcctttcactaagacaggaatactggaagagagcctggttccaggtgctgggaaggggcagacttaatgttttagacatgttggtattgaagtgcctctgatacagccaacaggagatatcagagaggcagttagatatataggtctctagctcagaggggagaaaatcagggctagtgaaaaaatattggaaattgttatgttgaaaccatgcacccaggcgagagtgcctaagcagagactatagaatgagaagaaaagagggtccatgattgagccttaggaacccaacacttagtggccagttagaagaggatgagcctgtgaaggacacagaaaaggagtaaccagagaagtaggaaaggaaattaggagtgtggggagaaggcattacacagaaccagccaggttggtaaggacagaccaagggtaagagacagaaacctgttattttcattcacagatgtttgagtgcttgctgtgtgctggtacagacaagactttctggaagggaaacagagacagaagtcaaggtatagcatgagagacttggaaaagtcctagcagtagaaatggggtccaagaagtccttggttagtaagccttagcaattcagccttccactgggttcctctgttgcctccttgccatcatcgtttacatacatgtgaatatttagtgagtctgcagcaagcaggctactcagttcacactggaacatttgcattgatggggaagcgcagggtagcccaatcaaattccagacatgtatatttgaaattcttctttattttggattgaaaatcagctttctctcactttacccactgattctagtgctgctcccttgagcaacagataaacacagataaaatctttcatatgacagtttttcaaacatgtgaagccaggtatcatgtttaccctttgttgtttccatcataatatgcataccttgaattccaggtttttttcaggccatttagtctgttaaactagttcatgctaaacaaaacagaaacaaacaaaaaaaaccctactaagtaatgagttaatccaaaggaattaatctctctgtggggagatcactaggcagataggtggaatttccttacctgaagacatcctctctcataccttggcctacggaaattctacctacctttgaagctcaagcactatttttccatgatacattgggtggtgcccttaagccatgtaaccaagcctcaactaaaggacttgtcggcggggtgcagtggctcatgcctataatcttaacactttgggaggccaaggcgggcaaatcacctgaggatgggagttcaagaccagcctgtccaacatggtgaaaccctgtctgtactaaaaatacaaaaattagccaggtatgatggcaggtgcctgtaattcgagctactcggctgctgaggcaggagaattgcttgaacctgggaagcagaggttgcattgagccaagatcgtgtcactgcactctagcctggacagactcttggtctgtctcaaaaaaataaaaaataaataaaaattatccaggtgtggtcgtgcgcatctgtaatcccagctacttgggaggctgaggtgggacaatcacttgaacccgggaggcggaggttgcagtgagctgagatcgtgccactgcgctccagcttaggcaacagagtgagactctgtctcaaaaaaaaaaaaaaaggacttgtccctgctacattctgactcctgtatggtctaagttcatcttgttaagtgcctttgcctcagttctcactctgtctttctccttatcttgccactttgtcccatagtgaggcaagccatactccaacgcctgagtggaggcaatcaggtttttctggagtttggtagtgaaatggtggacctgccagttgcagtggtgcgtacctgtaatcccagcactttgggaggccaaggtgggtggattgcttgagcccaggagttcgaaaccagcccaggcaacatggcaaaaccccatctctctgtcacccaggctggagtgcagtggtgccatcatggctcactgcagcctcaaccaccgatcctcgcctcagcctcccaaatagctgggaccacaggtgcttgccaccatacctggctaatttgttttttgtagagatgagttctcactatgttgcccagcctggtcttgaattcctggtctcaagcaatccttctacacctcagcttcccaaagtgctgagattataggtatgagccaccatgcccagcccaggatgttcttaggctagagatatgaggaagtgtatgaagggagggataaagacagctgaaaaggaggggttaaaggtgatgaagaggagaccatgggggagctgactcctgctggagatgaatcgagtccaggtagagggtttataatacttttgcaaggaagagaggagccctctctgcctctgagagacatggagggaaaattcaggcagaggacaagaaagaatgttgaaaggatgagggtagattatagcgacaactgggcagtaaacagagagcagtgctcaggaccagcttccagtcctagtaccgatttgaaagggtagaagccaggactgtagaggtagtgaccatacacttggaaacaaaatggttagcttctttcatcttcaaaggttttttttccctccttgctataagttctatgatgctacatgagatcagaaactttgatggtggtagcagctccaaaataaaatgggaattttgaaagttgaaacatagaagatgttcttagggtcttatggaaattctacccactactgtgttctacagagtgtggtccactgtgagcatattggtaaatattagttaagattttctattgagaaagaaaaaaagtttgatttctctccccatctcatctgtccctgaagagagaaaagagtttaggaaatagttagtggccaaaaaagctatctctttatacttgcagtgacctgcacattaacactgacccaaagccctagaactccctgcggagacaacttcctgactgcatcagcttcctgattagggttctgctatgagaagggctagaatctgagagcctgtcgttcagctttaagtcagagtacaaagcaaaagaacctaccatatccgagggtgagagtgtatctttgactctgcttctttgggttaaggaggctggtagagagctagcacgcactgggtggaatgaggatagctggcagcttaaaccccgcttttctccttctgtgtaaaataccttcatgggaaactgtgggcctctctctgaacagtggaactgctactgtgctcctttgcttcagctggtggcacaggtggcgcagtgaggctagagcaagttcaggctggaataccagggaaaggtgtcccaagaaagcctgtgacccctgcctatgcagccttctgagacctacggaatgagctgttttgcatagctctgtgctttgggctgtctggctcattgctatcactgctggtaaatacgtagttttatggtccagtatcctatcctgtttagctccctgtctcacttgctctcaactgttgtgtatctcattggctcccaatttctgaaatgaagattaaaaacaaaactgaaaatgccctggagcagttctgccaactcctggtttttccattcggttcctctgatagccactggtttggggagacttccttttcctgctccagcctgtgggcctgtgcacaatagccgctggcacatagcccatcagataacaaggctggctctctgcaggcacagtgtggattggaaaaagtgaaagtttctggctggaaataaaagctcagaaaacctttgctatttttccccccagaccctcctgggtctgtagtgctggcctcctgtgagctagtcccatcccacctgtaaaaccaggggagagttcagtgcagctgatgaaggaggggacaggtgtcagggggaccatggatattttatcccagggaagtctcaccccagacactccatgtaacagattgagggcatttcatcctgcctaggcatagtttggaccagtgtctgaggtttcataaataagagtttttctttctctccaatcagtcccttacaagagacatttttatttgttctaggtaaaatgtataatacagctccagagtgtgttggtcagagttcagttgtgcagaggagaacccactgtagctagtttcaggaagaagaggttccataaaccagaggtgcacattgtggattatggaatcaatgagggaagaaagagaagcagcctctaggttaagacacaccacagagcgtcctccctcttctgtaatcaggaagccaccggtccagaagtccagtgcccctcaggtctggtccacacctgtcaacatcggcaaagctggagaccaggtgtggggcctctgctaacactgtggcagaaaaaccaaaggcttctgtgactgctcaggaacagcaggaagcctgttaatctcatagaagtgcatgtgattagctgaatctaaagaaagtcttagaaatacagcttttagccagttagcttctcaagtacaggaaggcacagtagaagggtggaatccatcttacgcctaccccatatatctgccacatagagtgaagggtacaaatgggattctacggagttcctactgtgagatggggttatgcggatatgtacctgtgccagcacatttataacttccgaaagaaattatgaggtagatagttctccccatttttgcagttgaggaaattgaggtgagagcttagatcatttagctaatgagtggcaaagcctgatctgaacccacgtatatctaatttcaaagcttagtcttttctccgtgcacctcacttacctccttagagttgcttctgctgctgacaaatgttgctgacatgtggattgaattgccatagaacttgtggactaccaagatgtcatccaaagctaaaagtaggaagcaggcagtaggctaatttttataagcaaagggttaaatagtgctctctctgtgttttgtgacatgataagacttaggaaaaccatcctttttttacagttgcactggaattttgtgttacagtagcaagggaaacagccaggtacatgggtctgtgaggtctgggtcactggaaagtggagtagttcccttggtccagatttcccctaaacctccatcttgtctttgcctacaaaccctctgttggccaagcggcattttgtattcctggcctctgactcccaaatgaccatggagaaaacaactctgaatttgagctgcatgaaacatgccactgtggatgtggctcacacctgtaatccctgcactttgggaggctgaagcaggaggatcccttgagcccaaggagtttggggctacagtgagctatgaacacgccactgcactccaaagaaagaaagatacatggcactgtgcttcccctgtgctgccaggaagtccccacgttagcctccctcccacacctggcaggctgtcatatttccttgtggatgggatctccatcctccatagggattactcatgggggacagatggcctggccagttcaaggagaagttatgtcttgtgccactgtgttgagcagcatgcctgccctttttggaaataaattatggtccccaaattgccttggctgaactgtatgagagtcacaaagcctgttttctcgcttcggccccaccataaagtcactttatggctttggggcttgggtttccctctgcgcaatgtggatgatgataatgcaccaccactgcaggggtgtagtaagggttaaatgagaggtgacaatatttttttaagaaaaaaaaattgccttgactgattttattgctctgttagttcatggtacaatatccctaaatttacactcagagtaactttagtttctgttaggacttagaaaataggacaaattctcttccatgggctgtttgagaccattgcaaaggcatggctcagataccactttatctcagaattggtggcctctaccctgtgagtgagatgttgagacaggaaatccagcaaaattctatgcctgttttcagagcaattttgtttctggcctttgctctggagtcaggtggggaggccagattactgaggaccccatgttagctttcctgccagagagacatccttggagggaggctggggtgatgtgtccaagaagagattggaagtattctccaataccagttcagtggtgaattctcaaaatgtattcagcacaaccacatgaaccatatgttctgaacaactgacttaatatagaagaattaaagagtcagtttcaactgggtgcagtggctgacgcctgtaatcccagcactttgggaggctgagacaggcagatcacctgaagacaagagttcaagaccagcctggccaacatggtgaaaccctgtctctactaaaaatataagaattagctgggtatggtgacggccacctgtaatcccagctattcaggaggctgaggcagaaaattgcttgaacccaggaggcggaggttgccttgagccaagattgtaccactgcactccagcctgggcaacagagcaagactccgtctcaaaaaaaagagtcagtgtcagtttcttaaaggtcattgaaaaacaatagtttaagcttcttagaaaatgtctttcaaaaagcaaccctctggccaggcatgggggcccatgcctttaatcccagcactttgggaggccaaggcttgagaccagcctaggcaacatagcgagaccctgttcctaaaagtgcacacacacacacagagcaagcctccccgccattctttttttccattaagtatttttcttccttctgagggtctttgaaatagtgggagtctctctggctcagggagtttgttgagctccatcagtctgtcaggcccaccctcttttccgggatgttctaagaccctggactgggctcttgagcaccctctgctgtagatgcttagtccctggtgcactacctctacttccaggtacaggctgagtgctcctggctccacatgagctttgttgttttgtctatgagacagggtcgcactctatcacctatgctggagtgcagtggtccaaacacggctcactgcggcctcaacctcccaggctcaagcagtcctcctgtctcagtcttccaagtagctgggtccacaagtgtgcgcctggctaatttttaaaatattttttgtagagatggggtctcaccatgttgcccatgctggtctcaaactcctggcctcaagcatttctcctgcctctcgaagtgtcgggataataggtgtgagccactgcacctggccacacatgagtttttgagcaataggaaatatatatacatatatgtataaacatgtatacacacacacatacataaaactaaaactgtgtatctcagattttccatctaaaactggtctggactagggatctatcatcaagaaaggagagaagccaggcatggtggcacctgcctgtagctgaagggggaggattgcctgagcccaggagctcaagactagcctgggcaacagagtgagaccctgtctctgaaacaaaacaaaacaacaaaacagaatagaatgagtcaggtacttccctaggtctccagctaccaaacttggtctctcttgcttccttagccatttccacagagcatcttgcctgcagttccatttcagaaaacctagtgctacagcccctgaactagactggagaaaccagccagcaaggaaagtaacctgcattgttgagggatggtactactctattcctggtgtctgggaattgctgggtcgtgggagagaggtaaggggtggtagataagggaatggagggctcttgtgtctctggttttctaaacaacaggataaatttgttcccttcagaacaggaaaagggttcaggataagagtcttacgtttaagttttgaagctacaagaaatatttgtgtgggtatagttaaagctttttttaaaccttctgaaaattggctcttctggtttggtgagcttaggaaggaaaaaagatgcaaacttttggcctcatttttgtcttctctgatcatggaaagcaacacagccagtcagaaaaagctcttgggctaggaggaaggaggacctgatttctcggactcaaaatcccttatggcagaaaaacattgctcagtgacttacaaagtgtgtcatttgtaagactgcacacctctgtcattcactaacattaggatgataaaccatttcatcttacaagctgatgtggtgaaagtacctgttaattggttttatagtctcttatctgtaaaacataaataattgtttttgggtgttttgggttttttttttttttaagatttaagttccttgagtctccgtctcctcctctgttaagtaaagcaaatgcttacctctcaggattgttgaaaggattaagtgaagtaacaaatgtaaaaataccttgtggaatgattgccacttagcagccactcaaaaaatatttgccaaacctctgttgtagagatgttgaaaatcaaatgaggttaattactgtgaatgtgtaacaaaaagtaaagcaccacataaatgcaagataatatcattactcagaccaacctgagcaacatagtgagaccctgtctcaatttaaaaaaaaaaaaaaaaaaggtaatatcattactcataagccaggaagtgtgggagtgggtaggaatggagaagcctgccttttgatcctggccagaccatcacgaaggcctttttacctgatacaagtagagaacaaataaggggagacactggctgggggaacagggcaacagagagagatgcacaggtatattcagttacctttccctggtccccaccctcaaaatactgcttggacccaaaactaaagaggactaagctgatgtattgagctgatgggaggaaatggcattagtgctctagaggaagagagaaggtgacattatgaaggagtaattatatataagaatttttttaaaagctagtctgattgccagctaaaatggtctcctaggggttattctggtttctgttttgtgtcaaggtttttttggtcggatatgccgtagtgcctgctccatctctggagtttgtttcctattaggaagggactttgtttgcctgagggagctggcacatgctggacgttggtgccatgacccatctgagtcacattcctgacctctagggcctaatagttggccccatgcctgctcctcttgggccacacaccctgggctctgttgttgaaagcctcctttatgtgctctaggctcccagaaccctggccgaagctcacctccccctggctatgttcctgagcggcagcagcacattgcccggcaggggtcctacaccagcatcaacagtgagggggagttcatcccagagaccagcgagcagtgcgtgagtataggggggctgggatatgcctgtggcctgtatcagcagaccaagctcataacaaggggttcttagtagtcacagtgcagaactgagggacatgaaccccatttgaaagctcttttataaaccaggcctgcccaaatatggattgtccctttttaagggccaaataacaatttctgccaaagatgggatctaaaggatctaaactacatagtttccttgttgttgggtgaggatttaacagatttttcttcatcgtggtcctctcattgttcctacaggcaggcaccaccacgcccagctcatttcagtagtgttttaacatacgactggttctaaagtgacaggttatgtttttcattggatatattttagttttgctgtttcttgatgaaaggtaaggagtaaaccatatcaaaattacactgtaggattggttaggctgatcatttatgatggtagacagttgtattagttatctattgctccataacaaattaccacaaacctagaggcttaaaacaatatacatttatcattttccagtttccctgggtgaggagtccaggcatgactcaaatgggtcctctgctgagggtcacacaagactgcgatcaaggtgtcagccaggctgcctgcctttcttgagtttgaggctcttttctaagctcagatggttgttgccagaattcagtttttttgtggctgtaggactgtggttcctcttttcttctgaatgtcacccaagggcttctctgagttcccttcctagaggccacctgcagttccttgccatggggccctctcacaacatggcagcttcttcaaagccagcaggagaatcttttgctccaatctgcaaagatggagtcataaaacatcacataatcataggaatgaatattctatcctctttgccatagtctattggctagactcacgtcacaggttctacttgcactaaagggaaaggcagttcattgggactaattggaagagggagcaatcaccttagggtgtgtctaccacagtggctcagccattttagtggctagcttttaaattggtggcttacttgatgcaaatggcaatttggcttagtgaactcaccaagcatgagatctctagcttcattctggtcttttcaataaacttgctttgatgtaaaagaaaaggctgctcttacactttctgggcttggcctgagaaggggaaatttcttaaggggaaaatgtccaacagaagggcctgtgctgtcacatgggagatcttataaaaagctgattcttgtaacttttctttcattattcaaactatgtaggctatgagaagccctttgtactcttcttccttctatactcctgccttccagataaattcatgtttggagtagtgacctggagtgccattagctgcagatttcctttttgggcattttactgaccatcctttctggtttctctaaccagggcacttctggacatcagctgttctaggggtgacttgggtgtaaaatcccagagattgcagatgagcttgattgccctcagtctatgtccctcgccatggtcctatactctgcccccttcacttttttactttgcctgcatggccctggaaggcctgggaggatttgactcccagtgaggacagacttttagaaagaggccaaggaaggcagtggttggggattgccaaggtcctcccccagcgcctgcctctttagctgaagagaattgctcctggtaacaggccatttgagatcaatctgcttaacaggaacgaacactgcatagtatgtaataaaagaatattccagtgtgactttactgaaaagtgaaaatatgataagttttgttttttctttaatcaggtttaagcaataattgcatctatttactaatttttagaatgagcaaagcatgattcatgttaattttttggcctaatttttccaacaaaaattatgtcagtccggtcgcagtggctcatagctgtaatcccagcactttgggaggccaaggcaggaggattgcttgaggtcaggagttcaagaccagcctgggcaacatagcaaaaccctgtctctacaaaaaaaaaaaatttaattagctgggcatagtggcacacctgcctgtagtcccagctactcgggaggctgaggtgggaggatcacttgagcccaggctgcagtgaattgcactccagcttaggtgacagaatgagaccctgtctcgaacaacagcaccaacaacaaaatgctagcacaatgtaacgtccttcactccctgcttgacttctaaccataaagaacgtcattttttacaagagcgttcacaggactcagcagttttccccaaggcctcttgtgaatctttggtattcttcctccaccacacctgccatgttatttatttgtccattttgtctttttctgttaactagtctaaatttgccaaatatgcatctgatggatttaaagcaattctctccgatgttggtttcatccactttggctatcctatatccttagcaacatttgcagttttactttgcaattaatttgccttgattggcagattttaaaaaatcatgtgtgacaacatgacttaaagcatttgaaattatgggtggggatggaccctggtattaaatgggaaaaaatatttgagttggaaactaattttatggaggtcgttagtgaattttcataattctgatactttgtttccctatgtaattttttaaaattaattaaaaaaatatttaaacagaaacaagatctcactatgttgcccaggctggtcttgaactcctgagtgcaagtgatccttccctctcggctcccaaagtgctaggattacaggcatgagccaccaagtctggcccctatgtaatgtttaatgttggagctcggataatgaatattctgaaattgaagaccccaccccaacttttgtgcagagaaaatgaaagggaggaccttcaggacattgattggagaaaaagggattccaaaggccttttgttgctgcatttgaccaggggccagagaaatattttattatatttagatatctattacctctgcattggaccaggaactgggacatttttgttctggtatcagctgtgcactaactagttttatgactttagacaagtctcctaacctttctaggcctgtagtgctcatctgtgaaatgaggcaatccttgtctttgtaaattataaattatggagtgtaaacagaagcattaaggtcccacccgaactcactggaaggctcagcagggtagtaccatctccagcgccaggctccagtgttaatgagccaagaacatgccaacaagaaaagcagagcctctgctttgctctcctgccagagctccttgggatgccagccaagcatttttctccctcctggaaacttgcctttcaaactaagggggaggatggtacctttctaactattcttcccattgcatggggagaaaaaggacactttcatgttttgacaaaaaggcccatttgctggcccttgccataaagcctgggtcactggggggaattggggctgggggtgtggcttcattgtttgacttgccttacagatgctggatcccctgagcagtgcagaaaattccttgtctggaagctgccaatccttggacaggtcagcagacaggtatgggactgtgggtggtttggagggtaatgcataggcatttttggaattgatgggttgaggaagaagagttagctctggaggcccagggttaaaacatcatgcttctaggaaaagccttctccttaatttccccaacaccacgagaatgttatgatggcataattaaatgaatgtaataatagctcataaaatagcagctcatttattaagtacttgctttgttgttctaagtgctttacatgttttgactttccatataatatatgccgctctcgtacttttggcctcactgctgtgatctgaactgagaaggagtggactgtcagtgttttagggggagaactgaattctcatccattgctttaccatcattttttattccaagtgtttttggtggagtaagaaactgaaacccaaaaacagaatatccagaatgcctagtgtaccatgccacctgcttggtgtatatcttcttcttacactttgggaggaaacaagtggtgtcctttacataccaaatcgcaagggtatgtttggagaggccttggcattgatcttgccactccctcgcctctgcctcattatgcccaagaacacttttgatcacgtctgtctgggcttaggactgtggtcagaggctatggaaaaggtttggggatttttttactttgtgtaactgattaattgttcatttgggtagtgatattatgactatggctaaatttgcattgtcttgcctaatagacctgagcactgatgagcactgtcttccctttagatatcatagaatacagtcatggttacttggtttccaatgtgtagccttgtttggggcttgctttccaaccaggggagtaagaaggcacaggcaagagtgccagggcttgctgtcatagactgagggctctgccaagacagggattgactctggctttggattatctcctaagctttggaggggaaaggggagagaagaggactacagaaggtctagtagttgggaaatgagggggcagcccccttgtgccactgccttgagagtttcaaacctgtggcccccgcaaaaggccaataagcactcttgtgtaagggaaagggccattcaggtgggtgctgggaaagatagctaaatttacccgcctctctattcttgggttttttcctctgtgcctgcagtactttgttttcttctcattgtgaatgacctggacttatttccttgaggtccagcctgacttgggctcagggctttcatcttcccttcacgggatctgggaaagggcatgagatctggagccagacaaacctagatccagtcccagctccaccaaatattagttgaatggcttcagacaagtcttttaacctctctattcctgaatttccccatctccaaaatgggatggtgatgattaaggtgaaagaaagatgcctggtttagcagcaagaacatagactttgggttcatagacctggatttaaagtctggccttgaggcaccgtggctcacgcctgtaatcccagcactttgggaagctgaggcacgcggatcacctgaggtcaggagtttgagaccagcctgaccagcatagcgaaaccccgtctctactaaaaatgaaaaaaaaaaaaaagccaggcgcggtggctcctgcctgtaatcccagccctttgggaggctgaggtgggtggatcatgaggtcaggagttcgagaccagcctggccaacatagtgaaaccctgtctctactaaaaaatacaaaaaaaaaaaaaatagctgggcgtggtggcaggcgccgtaatcccagctccttgggaggctgaggcaggagaattgcttgaacccaggaggcggaggttgtagtgaacccagatcgccccattgcactccagtctgggcaacagtgtgagattccgtctcaaaaagaaaaaaaaaaaaagcaaaaaaaattagctgggcatggtggcacatgcctgtagtcccagctacttgggaggctgaggcaggagaatagcttgaacccaggaggtggaggttgcagtgagccaagatcatgccactgcactccagcctgggcgacagagcgagactccatcttaaaaaaaaaaaagtctggggctgggcgcggtggctcatgcctgtagtcccagcattttgggaggccgaggcgggtggatcacaaggtcaagagatcgagaccatcttggccagtggcgcgtgcctgtagtcccagctactcgggaggctgaggcaggagaatcgcttgaacccgcgaggtagaggttgcggtgagctgagatgctacagcactccagcccggcagcagagcgagactccatctcaaaaaaaaaaaaagtctggccctgtcttcctagctttatctttgagcatatacataggactgtgtgtgcctaatctgtaggggtgtctgtgaagacagaaacagcctagctgctcatcaagtggatctgctattatgctatttttattatatggtgtatttgctacctcacagcgttctgaggattaaatgagaaaaacctcactttagaaaataggtaagaaagcagcagcctatcaacgatgatgctgtggctgtttttattactgccctgggcaaaggattctcttggagctctttgcctgttacagaggtgggaagaaaggccaaggagggagagggctgtgcagccaggctggagttgggtcagatgggggagatttaccactcagggtgctgtcaaatttgggtcacagactagtgaagggagggtggagaaagcaggagctgggctcagaaaagggctatttcccgcaaaatctgcttcccccacctaatgctgtggcaggggttagaaagggagactgcctggacgccctgcttggttgctgtggaagtgtgcgggagtctgttttttctttttgttttctccagcccatccttccggaaatcacgaatgtcccgtgcccagagcttccctgacaacagacaggaatactcaggtgagttccacagagcctgggtgggtaatgcagggtgtctgggtggggcctcaggtggctctgcttcgacttttctgagtcagtagctctccttgggcttgctgctttgaggtctcaggtgccttggggacttgggggcttaagtggctcacattgacctacccagaagccagtgattcccctgtcttactcagatcgggaaactcagctttatgacaaaggggtcaaaggtggaacctacccccggcgctaccacgtgtctgtgcaccacaaggactacagtgatggtgagttcttcttcacctgctccctgctggctgcctcaagaaaggacaagttgccatggggagggtgggttcgtccatgcagtgcctgtattttccttcattcctgaggatttgtggcccagacttgaggcatgggagacaggaaaaaaacaaaaacaaaaacagggaagatagtatttgtagaccagatgctgccactgggaactctgaccttgtttgaagccagtggtgtgctccaggggcaccatctctcccatgtcctcttctgccccacagcagcaggtggcctgggccctgtagaggggtaaggagtaggatacaaggaaatcagtgccttcgggtgtggcttggccttgcaagcaattgggagcctgttggccagccatacaccttccctttggccagatctccctgaaccagactacttcctaatttctgcttttgtcctgattcttggagtgcttgggacagcagcctctgtggaatgagtcaggtgggagtgcggacgggatgggctggagctggtattatctatcacttctggctgagacctggtttgtatattccgccttgtagcccggggtgtctcagacctggtttgtacgttccgcctcgtagcctggggtgtgacttgctctcctctggcccttgcaccctttcaggcagaagaacatttccccgaatacggcgtcatcaaggcaacttgttcaccctggtgccctccagccgctccctgagcacaaatggcgagaacatgggtctggctgtgcaatacctggacccccgtgggcgcctgcggagtgcggacagcgagaatgccctctctgtgcaggagaggaatgtgccaaccaagtgtgaggagctgtccctggctaggaggagactgcccaggtggtctcagacaagctacgggggcaaacagctgggcccctgggacccttaggctcagcaggtggtggctttggcccaaatgcaccacatgggataagccttggagtgtctgaagcctggctccactattgtgtgacaagcctcttctcctctctgatctttagtttttccatgtttaaactagggaagagcacacccttcatccctgccatattaagatatttaggggctttggaaggaaatgcatttgatcaatgcagaagagcatttaaccatgacttcagccaatcctctgcttcttaggactctgacttcaggtccgagtgactagggcactgggcttgctccagattgtggtggagatgctctactaagagatgatgggtgctgggtgagggggagcctgagccagagaccctgttcctggagaatgaatgggatattcataaataatgtacacaaagtaactctttccttctgctctcctgtagctcccagtgcccccatcaactggcgccggggaaagctcctgggccagggtgccttcggcagggtctatttgtgctatgacgtggacacgggacgtgaacttgcttccaagcaggtccaatttgatccagacagtcctgagacaagcaaggtacacttaacccgtggtctgacttcagttccctcctttcaacaaaaatgcctgtcttaccacacagagtagttgcctgagatgctgtaggttgcttcctctgtcattcttcccaaactccctttctgtccatcctggtcccagccacagggtgaaaggactgtggtctgaagagcaccaagcacctggaggggagggattgggtgtaaggaactaagctgatgccaaagtaccaagtaacccaaactgagaggtgatgacctgtgacacagaggggactccctcccctagacaagtatctctccccagctctcagcccaggaaggagctgtggggctccttcacttggtccagctctagaggaggaatcatatggcctgtctttgcagttcagctttcaacgtcgcttatacttcaagttctgtggacaaacagcagttaccttaactaagcacccacggccccttctcccacctccctgcctccttccacccatgggagtgccaccatcccaaggcctgcccagcattgtggccaagagctagacagttaagagagtcccccttttctccaactgcagttcccaaggcagatccctgtgaggccactaactagggcaagctgagctgaacccaggcgggcagaactagggccctgagagctgaggcgaccactgacccctcccctaggaggtgagtgctctggagtgcgagatccagttgctaaagaacttgcagcatgagcgcatcgtgcagtactatggctgtctgcgggaccgcgctgagaagaccctgaccatcttcatggagtacatgccaggggtacgtgccccttgaatgcatgtgagacacacacaaaagagggcctgacctgggggctggggcctgcaggaggggggtcaccttggataggagtttgaacacctgaggctccagaggcccagaggagcaaagtgaggtgatggtgggacttggagtcaggagggccctgcctcaggttgcagtgggagtatgagatgacagctgtcctaggtccagcactcccctgaggcatgcagggctggcccactgtccagtaaatgcagccttcatctggagcagagaggcctccctgctcctggatttgggtggcgctctgcttgagaaggacttggggtactctcttttccaaactgcctgacagctcctggcaaaatgccctgcccagccagataggaattgaacaaatcactcctttgctgccatgctgggggctggaatgggcttgcccctccaccagccctcccctgaggggactcctctgacttcttgtggcctccagggctcggtgaaagaccagttgaaggcttacggtgctctgacagagagcgtgacccgaaagtacacgcggcagatcctggagggcatgtcctacctgcacagcaacatgattgttcaccgggacattaagggtgagcagggccaggatacatggagtccccaggacctgggttcaagtctaccattgagtgcctgcaggggccaatcacttaaccattctgaactttctgaaaagtgggaccccagttgtttccctgaggaactggtgagattggttgagcaatatgagagaatattgccaagttccctctacatgtgggccttggagatggtcattttgtgcggtagatctgagactcccctttgctaaatcctttgccctttgcagttcatgtctaattcagtggtagccctgccctctccagcagctctcagtgacccgggggtggggaggatgggagaaaatgcaagagggtccagggttgcagcctctgccctttcatgcctcaggagccaacatcctccgagactctgctgggaatgtaaagctgggggactttggggccagcaaacgcctgcagacgatctgtatgtcggggacgggcatgcgctccgtcactggcacaccctactggatgagccctgaggtgatcagcggcgagggctatggaaggaaagcagacgtgtggtgagcactgggacatgcagaacccattcttccacccaggccatagtggccccccattagaaacacaccctggggactttgtggtgtggcaggagggagtgtgcccagggcccaggctgcagtgtgtgcaagggtattattgggtgcagtagcacacacaccacatgggtggtgctcaaagcacactccattagagctgggaacttaggccatggaaaacatccctcatgtttgctaaatctcttaaggaagcaggatccactctgaaggcctgaaggcctggaccagtctctcaacaggagcaggcttctgtcccttctcctagcactcaagacagtttgcacttgctcgacataaccttgtgtctatcctctgaaatggcccctaagtcaggagagcttctccccttggaaagctattgtggtgggctgaataatggcccccccaaagatgtccactgcctaatccctggatctgtaaatgtgattgtatatagcaaagggcctttgcagataggattaggttaagggttttgagatggatggattatcctggattaagggtccttacagaagggtctcaagaggtcagagtggctaataggaggtgagacaatgaaagcaagaggttggagtaatacaaggaggggaccatgagccacgaaatgcaggtggcctctagaacccaggaaaggcaaggaaacaggttctcccctcagagcctctgacaggaaccagccctgccgccaccttgactttagccctgtgagactgattttagacctctgaccttcagaactgtaagatgatacatttgtgttgttttcctgcctctaagtttgtggtcatttgttaagagcagctatgggtagctaatacagttattgtagagttctttctgtcaagtctaagtgattctctttttccttatttcaagaagtacccaggtgtgtggtgagtgtaggtccatgaagcccacgtggacagacatccaagctgaggtatccctcagcttggcctgtcctgcacctcagcttgctgtgagaaaggcgcctctttctgcagtggtgggcaggacagctgggagtccagggctggctgaggggtgacacggggttctctctttccaggagcctgggctgcactgtggtggagatgctgacagagaaaccaccgtgggcagagtatgaagctatggccgccatcttcaagattgccacccagcccaccaatcctcagctgccctcccacatctctgaacatggccgggacttcctgaggcgcatttttgtggaggctcgccagagaccttcagctgaggagctgctcacacaccactttgcacagctcatgtactgagctctcacggccacacagctgccggtcgccctttgctgcatggcagggggctgctgctgggctcagtgaagttgctgcttctcccaggcaaggctgtggaccatggagtggcagcccagccagcgtcggtctgtgccccttccgccactggggctcagagccggggtggggtggctgcagcctcaggactgggagcccccagcctgtcagatccaggagctccagtgtcctgagctcagcgtggaggggtaggggctgggaacagtgtgcaaggcagccgtgggccccaccctcggggatgtgtcctgacactgcaattggcaccgaagcccagagggtctgggggcacaagactgacgccagggtatgaagagtgttattttcattcaaagtgttattttgtttttccttccaatgtctggagaccaccagggcatctctgggctggatgagctcccacaagcctgagggaaaggccagcactcgctagcagtggcaggcagaggcccaggctgccgtcccctagagtcccaggttggctctgccagtcctgtcctttaccaaagatgaatgaagcaaatgtcatgctgccttattcagggaaggaggagcctgtcctgcctgtggccatgaccctgcctctcccaggcaggggcccgcgatgtggaactgctgccactgaggggggatccagttttgtcaatgcagttgtctctgttttacaagttggagtcactcttatgctgtacccagtttctaaactggagactgtgtgtgccctctgggctctgagtacccctgctttgggcttgggcctaggctgcattgaaaagagctgaaggttgtggcctttgcgctcctggcccagcctttgttccccactggagcagaaggggagatggacgacacggtcggggcatctggcctggccagtgccctgatcccagagagcccgaggaggtgtctcaggctgcctgagtcgtgacctgctaggccagagcccactccatctggtagaagggaaagcccatatgctaccaccagctgtgtccaaaaccgccagctctgttcttcctcagccagcctcgcccatccccttgaggtctcagcccctttcccttgtagctcctcccctggagggggaatggcagcaggggttggggaaacagcatctccaagcagcttagagttggccatatttacctcagcctgggcgctggtcctttcttccggcccctcccctccaaaatgtgcctattgctagagctcctccctctcaacacccagtttccttgggagttgtcattaaaggaaaaaaaaaaaaaaaaaagccagtgcccagggatgggcatctccagggagctggggattagtgccaggcagccctgccagccatgcctacatccccatgggcacagaacaagccaaagccttcgttgtatgttgacgatgcacttttatgaatgtagtttctatcgctgtttttagccttttcacatcatgtaatgtgaggccttgtacttgttaatttatatctcagatcatatttgatggtttttatatatatcaattctagactgttacaggtgacggacgcctcaagagagagaagagaaaatgaaagcagctggttttgcagaagtgtgtgtcgcatgcgccagttgggcctggaccctcctgtgtccatccctgttcccccaggggctctatcagcccctgtaccccacactgccctctgaagacaacacaggctcctgcttccacctcggcccttgcccagggtggggcctggccctcatcttgaccaaagctgctgtgtggcagctcggcctctctacgaccccatcttggtggctgcacactcttcctggcccgcacccccatccccagtccctgttccccaagaggatacagagcacggtgctggctgactcaactgtgcgtcccaggttcagggtcttacagagctccaccccctggggtcttacctcactgggaatgtgttttgaaaatgaatttgaagacaagccaacaaaccctgcactccaaaaaagcaaaacagaccctaatttttttgtgccaaaaactgtggacatgctggctcagcatcctcaggaccaagttgttgcttaatttattgttttttaataactaatccagataaaaagttgtggggcttcagggtgacctgggcccaaaggttctgaagggcagttcctggcagccccaggcttgctgtgggaaggggccgtgccgtcactttctcatcattccatggggtgtgtctgcctgggccaactctgcatggagaggccagggctggggacagtccgcactctgccaccctcctgccccttccacccaccccagctctatgtctgtgtctgaattgtggatcgtgcagccatggttattgtggaactgtggaacctgcagccatagttatttgactatatcttgaccgagggcttgcagtgcaaagccaggccagtgttgcgcattacttacaataaaagggatcatttatatcagaggggtcctgtggcagtgctttcagttgtggggggtggaggtaggtttttgcttagcaggggccaggtatggtgcctggcaacgagcctgggcctttcaagcagaagagaacttgactccaagtagaggggtcctggggtgatctggctgataccattgtcagtccagaggtgtctgcccctttcctccagttgcccctccaggagctccactggggtggtcccaacagggctgatttaccagggtggcactgctggccctcacaacctgaacgtcaccagtggctgagttcccggagctttcatgatatttggtagggtcttcctggcccagaggacttccttcagtcccatctttgcagggcaggggtcaggtgtctccaagagccacctctccagtacccccttgtggtcatctgctactgttgcttaaccgaaccaagatgatccttgccatctgagacctctggtgcaggaagttggcctgccctgagaggctctgaggcgctcacttcacacttgggaggatccaggccggggcaccatctctgctgagtattcgctctgctccctcgaggagcagtgcctgcctcagcatagtgacttatgtgacactggagcctgtggcccagctccctgccctgttccacggggaggccacttaggaactcaggcagttgtatggtgtggtggcagcaaaccctccaggagtctctgttctcatcgatcccatgtctggagacatcaggaagttgaatctggagcaggacaacccagacttctgcctgtgtcccaccggggcgccctcaggtcctcccaacttgcctggtttgctctgctgtgaactcatccctcattgtccctgggttttcagagaagcagaggtagtttctctttggatttcctgagacagtagctgtgactgcacctccgcagagcttgaaaaggcaaggggatgatgacagcagcgaggggtaatgatgaggggggacaatccaggggtcactaaaaccttgggcagcacttgctgggtctgctggttaccgccattcttcgctaacttacttccaggtcaaagggctgggaagaagggagggagctagacagctggaaccagccagggaacgcggcagcttgcaccccaggcactgaagtgcagcgaggacaggcgccatcacccactggcagcctggccctcccgctctcaggcctcttcacaatggggtgcatatggtaagttggtgggtctgaaccaacccagaactgaggggtgaggtggagtttcagttccaaaaccactgtgggtgtgacagcatgaagccctcgctgtgaagaggagccctcccatttctcaatggtgtgtcagggaactgacacccacttctagctccctgcccccatcagggccgaggtagtcggggctggccctgtccccccatgcccgccccatggtgagtctgcacccttcctgtgacagatcccccagcaggccacacaataga

SEQ ID NO: 354 - DNA, 23969 bp, Homo sapiens
  source 1..23969: mol_type = genomic DNA
ttgcccttctggcttctctctaataatggctttgggttggtctttggagctaagataactttgctcttgagcaaaaggttctggaagagggagttgtcctttacatccacccctgacctgctaaggatgttccctagctgaggcaggtctacattctaaggaacgattagtagccatgatggcaagactgctttcctgagaggaaaagccaggcaccatggcagcagatgattaccgtgagggcccagtgaaaggggcctgatcacgaaagctgagaaagtagtggccacccctctgggccccagggacagggaaaagagaagcagccatgacctttggctctaggtattgggatattctcagggctggtggtcggaggttgccttctgcacggaaggtgcctccagctccttgctaggtgccgcactgaaggaaaggggccagcatgactggtcggcagtccagatttgcaaataggactccacgagttgtggcacagtttgctctgcacgttttctgccctgtggacagggtctctagggttctctcgagagaccagagaagccaatgaggtttgaccagaggctctacgacccagcaaagctaaggccctagccttggcagtccgtactctgaaataactcaatcgggaaactcagggacttgaaggcctggaagcccaggaataacaccctctcgagggagagacaatgaggaagaagccatggccaaagcctagcagggatggaggtgccagagggaacagaaacaaccaaaatgatcccaagaagtcaacagtgggaggagagggaaaggcgccaagtcttagaatgtgtgtctgtgggtgcagaagaggggtgctctgcaggaaatgcagttgaggcgctaagaaggagaatgctgggaaggtcctggcgagagaccgagaagcctggagggctcaattcaccacgagtagctgtttggggctgaagagagatttgggtcaatctttagagaagacagcctctagggagagtctttgggagggtcccctcaaggtaaagggacaggactggggtgagggctggatcccagcgcaggaggtggagtgtttctgggtctcaggcaacacatttgtgttacgttacattctcacaacaaccatgagagggactgctattgtcccatttcacagataagaagaccaaaccttagtgctctgaagtcactaatgcaaggccccactgcccagtcacttgtggagccagtgaattcacaccacctgactccaaacctgtacactttaagagcccactgacatcctctcctttctctgccttcctccacgaccctccttttccgcctgccttcttggtctctgctgcggggggccaacctggaccttggggtccagtgtcctgccattagtcatctgatacccgggcactaagcccaaccggagggacaaagcccacaccggccacggggtggaggagagtcgatgtcggatttagggcggggctgaaccaagcccagggccgcgggggccgtggcttcagcaccgcggagagcgccatctccgggggcggggctggcggggtgggggcggggcctgggcggggcgcgcgagaccccggccgggtcccgggggcgcgcgcggggcgctctcgccagtcccgcgggccgtgcgcggtgctgtgccgcgccctgccagacacaggtgcgcccgcctagcccgaactccgcggcggcggctgccctctcgccgcgcctccgcctccttcgcagccgccgcctcctccgcgccgcgctccgcccggatggccagggctgtgcccgagaatggcggagcgagaaagcggcggcctgggagggggggccgcgtccccgcccgccgcctccccgttcctggggctgcacatcgcttcgcctcccaatttcaggtgagagtccccggccgccgcgcgcctcgcccttcagcggggactgatccgcattggctgccctgcccgccccccaccccagaacctcgggaacccgggaacgaaagggctgcgtgggagtggggtctcttcccgggacagagcccccctcagaagccccgccagcctcaagtccggactggtagccgttgcatgttcacgaggctgttccctccgccattcctggtcctaggctgggaggtctgcgctggaattggaggagggggctcggaggcctccttctccccaacctccgggctgcggcagggtctggggtcggggttgcgatcccggagcgggcaggcaggctgcatcttagcctgtgaatagagctgggaacagcctggaggggcgcgggtcgcagtttcctggggcaacgacattgttggtgctgggaggaggatgtttgagcccctccccgagccctgcctggccagatgggcctacctgccaggcctggcgtggccgggcccctctctggattgggcagcaccgacctaggcaggtgtgtctctcagggcaggcgctgaaggctcagcctcaaccaggggaatcctaggcccggctgcgggaagggaagtcggctcggctctggagtagccagggccagcgagggtgtcgaggggatccctgctggggtaaatacccagaaccctgacctgagctcctattccaccacccccaccccccaatctggtgttaggcccgatgcatttcagagaagtgaggggtgagtgttgtgtggaggaggaatagatgtacctcccccataattctgaaccctagttggtggggaggaagaggccgaagtcactgctcccggcctagagagggaggcttagacataccccattgtttccccatctcgagaactggcgccttcccctctcctggggcaccaccccagccaggctccagctgggctgtggtgccagcccctcctgggagcaaggggtcactggctcccaggtcctcaggtgggcagagacccctggggatctctaatagcatcatcaaactcagaaaccttccctgaggccctgagctgagctggaaggaccagagggggccagatggaggaggccaggcctgaaggctccagggctgcagctctctgataatgccttagactgaggtctgagactccacctggcatggtgcatgaggcctccatgcaaatactgcctccccacctggaggcctctgcagtggaagcacatggggcttagagggacctgggttcaaatcctagctccactactttctaactgcatgacccaggcaggtttttgtcctctctgggtgccatctgttaagtgggctaattaatattgattcttgcctggaaaggagaaaaagcacatcaggtcagtgttcaacaagtgtcagcccccacactagcagacaacactacggctcgctgctgtccagagtgtcttcccaaggcccctcctttaaccctcataactgccccaagagagggtagtgacctgcccattttatagatgaggtgattgagattaacaaaggcagggtggctcatctggagactacaaaagagtcagagactaaggctacactgggacccaggtctgtgcgtgtttagtccactctacgtcccagccctgcctctggcccagtgggcagcttttcttcctcgacctgcttccccaggtgtcatagatgctttaatgagaggagctgaggaagcagacaccagccagtgaatgtgtggccagctctgcggcatgtgggacaagggtggcagtaggccacgaggctgaggtgtgggccagcactccagaacatggtggcctggctgcggagacaaggccagtgcgtgggaataataagcgtcagtgtctcaggccctgccggcctgccccgctgctcccaaagcccccgctgccctttctcctggcccgcctctcactgtgcttggccaggctccacttaaccctgggtgggtagatagtgctttcttgtggctctttggtggagtcatagatccaactggcctgggtttgaatcctggctggcccttcttacctgtgtgccctgacactgggcacttaagccctctgagcctctgagatgccagcactggcccctgctcaggatggtcctaagaatcagatgagataacacgtgttgagtgtttcaagggctgaggagagccgcctgtaggcagggctgtgtgtgtgcacacacacacaggcgccttgacccccagtgccactgtcagctcccagaaaataaagggggtctgtacccaaactttggtatccccattgctcagcacgggatagttactcaataacagtggtaagcgctgacatttggaaggcactcagttcgcccaggcaccattctaagagtttcctatgtgcaagagtatttactcctcccaataactgtatcaacagagcgttgttattatccacacttgcatgaagaaactgaggcagagggaggttaggtaagtggcagagcttgtaagtggcaggcagtctgatgtcagagccaccccaaaaagaaagagccctagagtattggaagagcatgtgcggagggggcgagcatgtggacctgacctgaaggggtgggagcattcgtttgtttgtggtaggttaaatacgtgttaatttttgttctgattatagctccagctgtttatagtggttggttacctttgggtatggtatggggtgagggatttttacttcttattttacatactttttttttttgagacagagtctcactctgtcgcccaggctggaggttggagtgcagtggcatgatctaagctcactgcaacctctgtattctgggttcaagcggttctcctgcctcagcttcccaagtagctgggattacaggtgcccaccaccacgcccggctaatttttgtatttttagtagagacggggtttcaacatgttggccaggctggtcttgaactcctgacctcaggtgatccacccatctcagcctcccaaagtgctggaattacaggctcgagccaccacgcccagtgtcatacttttatattacaggttgagtatgcctgatctgacatgctttggaccagaagtgtttcagatttctaatttttttggattttggaatatttgcatatgcataacgaaatagcttggggatgggaacccaagtctaaaaatgaaattgattttttcttatatatcttatacatatagcctcaaggtaattttatacaataatttaaataattgtgtgcatgaaacaaagttttgattacaacctgtcatgtggagtcaggtgtggaatttacagcctgtgctgttatgttggtgctcaaacatttaggattttggagcatttcagatttcaggtttttggattagggctgctcacctgtatttgacttcttattttataatgagtataggttacttctgtgtcttacaaaataataaaagaaaattcaaaattaaagtgatacatgttcattataaagaaaactctagaaaagagaatttagaaatttacacagtggagacattggcactgggtaggtgggacaaagaggaggggcagaaggacagttcacgtgggaggaacagcagagacaaagggggtttcatggacaagaagggagcgagcggcctgtctggggtgtgtagaaggggaatcgtggatctgagagaccttagagaccagctcgtccaaccagctccctccccttatgaggaaacaagagagggcgagtggctcccccaagagcacacagcaaattagtggcaaagctgggatagagccaggccatggctgcctggatggttgccatctgccccagcaccctgcctcagggatgagagatggggccaccgagaggcttcttccttcattcactcaacaaacgtttgcactttgcctaggtcaccagggaaacactgcaaaggcccagacgtgggcctggccatcatgctattggtgttgtagaggggagacagacagacagacggctttacagatgggctggtcggtgtgatgatggctcaggtcaagggacccaggctcagcgggtctagacaggccccccagaggcagggacatttcagcttaggcctggtggacgcataaaaatatcacccaagggtgtcactggagtgaagggcggagaccagagcgggtgggcagggtgtctggtgcccagtctggcaggagggtggagagcaggatgtgcaggaacttgtaggccatgtgacgatgccgacctcttcaccaacagccagaggagctggcagggggttaggaaaggaatgacagggtcagacagatcctctaggacaggggtgtccaatcttttggcttccctgggccacatggaagaaaaattatcttgggccacacgtaaaatacactaacactaacgatagctgatgagctaaaacacaaaaacatctcataatgtttcaaaaaagtttatgaatttgtgttgggccacattcagagccatcctggggctcacgcacccatgggccatgggttagacaagcttgttctaggaggatcacctggctgctgggtagagagcggccaggggactagccatcctgctggtaagaaggagggacaggttcagggtgtgaggaagagttagggggcagattagcctgcttggtgagggatacagaatagggagtggggaggcaggagtctaggatgatgctggggctccttggtgggtggggtgtccagtgggagaccagagggcggtgggcagggtgtgaaaatcatgtgggaacctgctgaatttgagactggggatcattggaggacccaattggaggaatcatacagtcagtcggttttgggtctggagctcagaggagaggatagggctggggccaaagaccctgggagtctgagtttggagggatggccactgaagcctcagagaggacatcactgtccagggagactgagcagagggcaggaagatggctggccggtggcctgttcagccaaccatgtttcggtggaggtggggaggtgctgctggagctgcctcatgcccaggaccgccttggcctggctcctgatggaccttggatgtggaggcagagagtgttgacttgcctcacacagtccggcagtggccagggcagaatttcaaccccagctcgctgatggcagagctttaaagttcgtctctggattgctggaaatgggccacaacacacttctagcttggggcccccatggttcccacaaattgggtcacagccaccatccacacgtagttcttaatcattctatgatgccatctttgttccctggccccactcttgtattcattccaaaatagcaggagcgtctctgggtgctttgccttgttccgccactggagatgccagtggagagctcatggctcctgctgtcatgttgcttgcagtgcctctttaataggcactgatttagcacctatggtgtgcagggttttgggctttgtgcatagattggagcaaaggtggggagtcagtgcccaggtgagtatgatgaccctgccctcaggaaacttgcagctctggggagggcaggcagcccagcagcagacggggagcccatgctaggctggcatgacccaagatgaaagtctgtgaaggacagcaaaggagaaaagagcgccccagattctaccccatctcacaactctgtgtccatgtgagtgtttcttcctgtgtgcaatatcatcctggggagaccactggatcatatatgctgtctttttgctcattttattagttgtcaccttaatacacagactttataatgttgattccaaaagactgcatcacatttcatctgctgatggccacgatggaaccagccccctggtgctgggtgacgcaggtgttttcagttgtttgctgtgatgaggaatgaacatcctgtgtgtaacagttcttctccaaacaatgtgggattgtttcctcgaagcagtttcccaaaagtcgaacaactggatcccagagttcttgcaatgtatcagcatgaagatgtttaaacagatcaaacatgttataaccgcaagtggggttgtccctcggggctcatttctttggttggattcagttttcgttggagatgacctccgtatggaggtggtcaggaagggaattctgacccaaagaacaaacccagcccaaccccatgttcacccagagccaggtggtgggggtagagcgagggcctgagagggatgctgggtctggctcatccccaccccaccgtttcagccagcaccgtcttcccagaggacctgacatcctagcccagactctggtgtaggtggggacacaggaagttgattggaaaagtggactaacttagagatttccaaggcaaaaatccagagagccctgggacacctgtggttaattcattcagcatttgtcaagtacctattaggcaccacacatgttgatcaaaacagatatgatcccacccatatggattaactgactccaaggggaggccaccgcgggccgcataacccaaaggtaaaattacagtgatacggaaccacagccaggagggactccgagagcccatagcagggcggtttggcttggtcccagaggtcagagaaggcttgcagaggagaccatgctactgctttgggagctgcgctattgaaggaggagataaaggtgggaggtggggggaatgaagggaaatgatactggttggagggaaaggaggctttacagagccttcaggccacagatgagaatttgggccccttctcctaaggaccaggggaagctattaaagggctttgagctgggaagagtgaccagaccagatttgtaattcagaggtcagctttgctgtcattacctggtggagagtggctggtagaggaaccagagggaaatggggaacccacttagggttgagcggccagtcaacaggtgtcctgagaactcactgggagccagcttcgttctcagcacttagagggctgcaaagaggcaggctggatccctggaccacacgtgccctctgtcacaagagaggcttgtggggcattgtggccaggacccaaggtcaatcagctggcatccttacctcctcaccacagcacagccaggaacacaaaggcccaagaatgacatctgaacagccaatgcctggctcagatttggccttgctcagctaaagcctcagcactttaccacttaacctttgctttacatacacttctaactcagcctactacggagctgaaatagtccgttagaaagggcaggactgtggttggtggaaatgtgacccagcaaggcaggggaaaagggcctgaaatcaacatcagaacacaaaaggcatgtttgttcagggccatttagaaaagtgcagctcagggtggggtgggagcaggagctggtatggcgagaacagtgaggagctggcagggcaaaagcaaggactggggcagcagagtaggagggatcaggtgaatgcaggaacagggcctcaggtagaaaggtcagggcggtctccagagaccaaactcacagctcagagccaccaaacgttaatatggatgacgtctcaaggatcacagcatccaggatagacaagcaggtctgatgggtgggcaggggctgcttctacaggagactgctgaaacttccagacccagaggtgagggaggccggcctgcggagggccgtaggattcagtttggaggcctcctggtgctaaggctgccatgagcagggtggatcaggcgggacaggagggaaccgccctcttttccccttcttcccctcccttctcccctccatcttttcctccctcctcctttccctcccttccccacattgaccttccatgagccttcagggaccaagtgtctgtttagccttctctccataaagggaccccccagggttttagctgggaggccagaacatctggtgcctggaaaagaggaaagggcagagtcttggatggggggtgacttgcacagggtactctttgaccaatcagtcccccttgatccttggtagtgacctcctactcacacaaattccattctgctaaccctcaccagccctctgaggtgggtgggcagggattggtggcttcatcctgtatctgggaagctgaagcataaggcacctttatgtctaagccttagtgttcctcatctgtaaaatgggaaaaatggaacaaaccctctcccaaggttgttgcaatgaggattaagagagatgcatggcataaatgttggggccaagatggggcagcttcaacgtgaaagagtcaggatttatttcaggcctcctgcttccaagcctgatatggtgatcattcttccatcctgccttacttatgagaggcacctaaaaagtcagacaaagcatcccccttaacccaccccagtagagccagggatcaggcataggctctctgacccccagcccagtattctttctagcattgcccaattaaagcccagtgccctcagctgtacaggaagaatgctgctgtccttgccccacccagacctattgtccaaggaagtgggaatatcaggtgatgttgagggtgtagaagtgaactgagaagcctctaacccaggtctaagccagaccctgcaggccctgctccagcctgcagttcgagaggagcaggtggaggcagaggctgtcctgtgacagacatctagcaggctcatgctgaggactcagtgtatgcaggatgaactcgccagctctgccctccaggagcaaggggaggaaggggtcttgatcacctgctgggtacagtatagggtcatcaatcagggtgctggatacaggccccatccacctttggagcagccagggggtgggaagtgggtgtttctgagggagggctggccctgtctgctgcacacactactgtacatccaggcagatggtgacatcagccacatgcaagggctgggagggcttcctggaagaatgagcttaactgagcactcttccagcaagcatggtttgagagtctgccacgtgctccctctgagcactgggtttggcactggggagacacagtgcccacgcagactacgcatggagctggaggccttgcctgcaggcacaggaacctgctgctagtggagagccttgagggttccaagtggggcgggagggatgatggcatttctggcagttttgcctgatagtggcaggtggagtgggatggtgcaggcatagggagactgagacagacaggccagtggggacatctgggagggcagaggcaggagctggactagggcttggcagtgaggaagcggagccatgtgtgaggagacacagatgtgtgcaggggggctgggcaccatggctcacgcctgcaatcccagcactttgagaagccgaggcgagcagatcacctgaggtcaggagttcaagactagcctggccaacatggtgaaaccctgtctctactaaaaatacaaaaattaaccaggtatggtgatgcacacctgcaatcccagctactcaagaggctgaggcaggagaatcacttgaacccaggtggcagaggctgcggtgagccaagatcatgtcattgctctccagcctgggtgacagagcgaaaggccgtctcaaaaaaaaaaaaaaatatatatatatatatatatatatatatgtgcagaggtcactggcagagcaggggcatttcagggcacctctgggtcagcggtcctgcagctctcccatgccatctgagtaccaggggctcccttttgcaccactggccttctcggtgaccatctgggcaaccagtgtgaattgaacacttacttggtgctggccactgggtttttgtccctgagcctgagatgccaccctgccctggccggacggaggagggctgctctggcttctgggccaggccctcctccccacttccaccccagctggccagccacaccctccccatggcctggggaaccaccacccttgggctgcaggtcagacgtgaccctacagggcaccttgtccatccagcccccattccccacccctctgtgcagtgccctccaggggcctccaggttctgtttatgtcattccaaagggagaggaagctcattaccacacagcagcccttccagctctgctctaagggcccaaacactggcctgcccttagctgtggctctggtgcctcctgcttccataggccctgccttcctgggtcctgaaggctcaagctctggctgcagaaggaggcagcccagatcaaacccagtttggatgcagcctgggcccacagaagcctctctgatgaggtcggggggctgagcctatggcagtgcaaaccgagtgttcattcttagggtgtttgggaagccccccttcatctcccacctggcaccctgactggggaactggccctttaaagccaaccaagggctggcttttggggggaaacatcctagatttctgccatctacttacaagcctgggccagggagggggggccactcagcccccgacaggggcattggaagggcaggtggagccagtggcattgattgcagtaacctgatcccgtgagggaggcggccacagcggcagcagcgcaagggccaggccagccgggaggaaggtgcctgcagctgagggctgcgctgggaagagctggggctgggacccgggtcggcagctgcagcctcctctcctggcctgtctatttttaatgagctccccaggcttctgcagcaggcaggacgcagaaagacaggcccaagcggtggaggccagaggcccccagccctgccttgagccctggcccccccacccttccgggcatgagagggcagccctggggccccgcagccccccggccgggcagggctctccatgcagctggtgctgaagatggattcgagcccagacaatgacagctggttggaggatcaatgggagcgctggtaggggctaccggggctggcgggggtggagaccgagttggggtgagctccatcgagctcagggtctctgatctgaatgaggcgagtggcagggagtctgggcctcctaggttcccctgggggctaagccaccatctctcctgggtgaccttgaactagtgggtttcccttgctctgtgcctcaatttcttggacttatttgggaaaaggctcatacattctccccaacttcctaaatgttctacccccccaccacccccccagcaagccaggcagagtgcccaggacctagaggtgagcaagagacaggctgccttgcagtggctggcccagccctgcattctgaggtggggactcagggctggcctagggagaggggggttctagtggagctggttagtattctggtgccctggtgctctgagctgtctcccaaggttgtaacacctctggtcccacctggggcttctcctgaccccatctgtgcagcctcctgttcagggtccttacactggataaggagaagatgttgtggttgaagagatgagaccaccaagtgcacagcatgaggctggagtcctttctggaataggctgaaactacccacactgacaccagattttccttcgcttgttccctgggctcaaggggcatgagtcttcctgagctggggcgtggggcactcctctgaggctgctgccggcgcctcgggtcttgctactgcagggattgcactgggagctcccctactccaggctgctcttctcaagtccacattctccatggtgaactggccttggcacctgccttgaccctgggaggaggctctgaccagttgggccttctaagcactgcctgctggttggcaacagaatgacagcttccagggaggagccagagtgacctggagcctcctcttccactgccaccctaggaggactgccttttggcacaagcccctcgctctttccctgcctgctgaccaccccctgcattgatacagatgaaccccaaatcctgtcctctgggggctgtgtttggccttcaagaggctgcaccctggaagaggtaacagggagatgtgagcaggcatagtgcccctgagttgtaactttggcttcctgtccccaccaggctcacccatgacatcagcctggaggagtttgaggatgaagacctctcggagatcactgatgagtgtggcatcagcttacagtgcaaagacaccctgtccttacgggtaagggcaagctcccaggagctcctgagtggggtggcaggaaggctagggacaggggtaagggtatccccatagtgacaaagggggtttcaggtctgtgctggcaccctcatgaaatgaaatgatgtgcaagaaacataggtatactgcttggcacgtcttgagtgtacaatcagaatttcatttggtattattattattattactgctgtcggggactaagacaggaagtagctccttcaactgcccacgagatgggagaggccaggaagtcttgagacctagggcagtaacaattaggaccagacttaagggagactcagggctacccctgaatccttttgggagcagccctggcagagggcctgaggcagacagggtggagtctggtggaatctgcagtgctttagggcaggaagaaacagccaaggcacccctggaatagctcctgtggctgctggctgctattacaccagacagatggcaccacgcggcctcccagaccctctctggcctatagtcctaaaggcccccactgaggggtttgcccagcattgctgctggtttgggccccttggctttgtcatagggaagatggctctctcctgtccctaaagatctgaatgctgccaggaggtccccagcacctgggtaactggggtcagatggggatcccaactatgtcttttcagaacaggaagaaggggccggcttgccaggaaatggaggacagagcacagggctaggttttagagcccagagctcctctgagcccccaagagggcgggtagccagatacggtgtcaggagagtggttaccataggagcgtgaggtgtgccttggggagggagtacctgtctctgtgttgacctcctgctactcccagagactcagtaagctctgcaagaggaaaccaaggggtgaggataatcccctagtccccagtaccccaaccttccactctctggccaggccaggaagaggcagaggcctctagatttggggaatggtctcagagccctgacttagcttctcagaggtcaggcacctgttctggactctcaccctgccctctcccccagctgcaccagcagagccttggagagggttgcctccgagctaggcaggggccccaggcactactggccagaggtgtgcccctaaggggcctcagacaagctccagcgggcttcacacacgttccagtgaatactcagctctctcagaggctgggaggcagtagtgttatccccactcaactgatgagggggcctgaaggatcaggggatctgtccaaggtgccagggagttggcggcagaactggagctagatggggctctgcatcctcaaggcaggctcgtggaggaccgatctagggctggaggggccccgggccagctggcttagggcgcggctgccaccgccttggttcctggcccccgctcgcccctccccctcggcgtctccttcccatccctctcaggtctccgccgttccttgcttggctgagcctcagtttttccagttttcctcaagaccccttcaaatactatttccccaacccccatcccttgcccaccccaccccgaactccttggcgaccactgagtccccatagcaacagcggtgacttcactctgggctcggcttacaaccccggtgaggtcaccggccgttgccaggggaacgggagggcgcaaggagtccggggtggggactgtggggaggtgctggccgtcagaggcacggctggatcggggaggcggcggcctcgcgcttcctcgcggcggacgggcgagagcgccccagtctccggcggcccctgctcggctcccctcgtgcccccttcgcgccacagaatggactcgcccgggcggggggcggtgcaagcggcctcggccccgccccggccccgccccctgacgcccctccgtgcgctgtgcagcccccgcgcgccgggctgctctctgcgggcggcggcggcgcggggagccggttgcaggccgagatgctgcagatggacctgatcgacgcgacgggggacactcccggggccgaggacgacgaggaggacgacgacgaggagcgcgcggcccggcggccgggagcggggccgcccaaggccgagtccggccaggagccggcgtcccgcggccagggccagagccaaggccagagccagggcccgggcagcggggacacgtaccggcccaagcggcccaccacgctcaacctctttccgcaggtgccgcggtctcaggtgaggcgccaacgtggggggcggcgccctgggccgccgcggagatgtgagggggagcgcagaggggctgcagcgggaaggggcacccacgggtccagtgcctggggacagcgcctgcataggggccgcggtggctcgctcccggtgttgggatccgaggagcgggcagaaccatccttacgaagagggggctgagtccagctggccgggcttggagccttgaggcgggattgaaggagggaaggactggggttaggagaggagtagggaattaagagaatgaggctttgaggggttcgaagggtttggagcctgggacctcaggctgtgacagggtttctcctttaggatatggggctcctggtgaaagtggagcaggagcagggcctggagaaaagggcatctgaaatggtcatcgtgggggaggccgtgggagatcgtggcgaggtggggatgggaagctcaggggccacagccagtttaagatctgggcagctgcgaattcccagaaggcaggggggaggaatgggagatggagctgcttggctaagttggggacctagggcccctgggagggtggctggatgccaaggagagttgaatagggttgggggagctggctgtggccctttgtcttccaggcccatcgggagcggtgcaggcaaggagctcctgggaggtggggcggctggggctgcggggaaaggcttggtccctttcccaggatcctgtgaatggcttttggcagcccggctcaggaacgtgagggcttgggagagagctcccaggggagggagcctccgtggagtggagggagccctgtgtgggcattgtggggaggggtcccagggctgagaatgtagaatgggcagcccaggagatccaggaaggagggctgctgacaactgcatctgtcactcctcagtctcatgccactgtggtggggggtgcaggaaaactctgttatggatttgtcactgggatgattcatcctggtcccccaggccagctgctagggagacccttccttgtgctttttccaggctctaccagaaggtcctcaccccttctaggccataacttcccaagctccagagcagagagtcacctgtctctgacttgggctggatttgagcattttccaagtaaccctcagtacctgggactgggggtctgactgtgtctccagagagctcctgcttctcttctcccctgcctcctccccctcttgccaccacacacattggccatcaccacctttgttaaggctgataagagcatctccctgagggttggccagcttccctgagcaaggcggagggccatccagagccggcaagcctggctgtgacttgccacccttcctgcctgctccagaggagagttacgagtgaggcctttgacagtggaggcggggtggacacagcaaatggccctagggatggcctgagggggcagggccggggcctccctgtgccgggcactgttgaccacttccatcacaagagccttttgttccctgcacaggacacactgaataataattctctgggcaaaaagcacagttggcaggatcgggtgtctcgatcatcctcacccctgaagacaggtaagtcagggccctcttccttacctggacctccgcctgccctgactcagtccccactacagagagcaaaccctacagtctccaaagggctgagtagaggtgaactgcccacccacatccctgcacgagcccatccaggggctgagatcagtggtggcatgagtgagttgactggccccagagcctgcgaagggcctgttgcccagggaggctttgtcttggtttctgtgtcaccaagctgagagtggcaggtgcaggtagctgggagttgggagagagcccctgccttcatgacctgcctgctctccaggggagcagacaccaccgcatgaacacatctgcctgagcgatgagctgcccccccagagcggccccgcccccaccacagatcgaggcacctccaccgacagcccttgccgccgcagcacagccacccagatggcacctccgggtggtccccctgctgccccgcctgggggtcggggccactcgcatcgagaccgaatccactaccaggccgatgtgcgactagaggccactgaggagatctacctgaccccagtgcagaggcccccagacgctgcagagcccacctccgccttcctgccgcccactgagagccggatgtcagtcagctccgatccagaccctgccgcctacccctccacggcagggcggccgcacccctccatcagtgaagaggaagagggcttcgactgcctgtcgtccccagagcgggctgagcccccaggcggagggtggcgggggagcctgggggagccgccgccacctccacgggcctctctgagctcggacaccagcgccctgtcctatgactctgtcaagtacacgctggtggtagatgagcatgcacagctggagctggtgagcctgcggccgtgcttcggagactacagtgacgagagtgactctgccaccgtctatgacaactgtgcctccgtctcctcgccctatgagtcggccatcggagaggaatatgaggaggccccgcggccccagccccctgcctgcctctccgaggactccacgcctgatgaacccgacgtccatttctccaagaaattcctgaacgtcttcatgagtggccgctcccgctcctccagtgagtcagcaaggggaagcagtggggtgggggggtccctagcgggggcagagccaaaatgcgaagtgttctgggaggcgaccccaggccccatctggttaggactgaggcttctacctgccccgctaaacctggatcagagctgcgaccccccatccagccacaccacctcacctgcaggtgctgagtccttcgggctgttctcctgcatcatcaacggggaggagcaggagcagacccaccgggccatattcaggtgagagccatgggctggctgggcctagccaggcagcagtttgggccacacaccaccctctacttgtcacccctacatggcctcagcctaacccctgccatcagccttcatttatccactcagccctgggaggacagtgtccactctctagggactcagagtatggtgacaaagaggatggctacagtgagggatcccagaactgtgcacctagtctggccaggggcagggcacccaggagggtgaccaggaggatgcctgcccacaccccacctgacccttctctagacaaaagcctgcgcttcccacagcctctccattttagagggggccctgcccacaccctcccttggcctgtgtttcctcgatggcagatgcatgtctgcttgaccttgctctcccctggggttagtactgcaacaggcacacaggatgcttttgcaaatgtttactgaaataacgatgctgctgtggctcccagaccccagagtaggcctggctggacaggccttggtgccgaatttctcacctgtccttgctggggacaggtttgtgcctcgacacgaagacgaacttgagctggaagtggatgaccctctgctagtggagctccaggctgaagactactggtacgaggcctacaacatgcgcactggtgcccggggtgtctttcctgcctattacgccatcgaggtcaccaaggagcccgagcacatggcaggtagtgttccctccctggcctgtgcccccagccaccacatctgtctgccccaacttgctgctaggtgaacgtgtactccagatctcagccagccaggtggggggctgagtggaagtgattttaggtccttttcacgatcaagcaaagtgaggcccggccaagttgggcagccagggattgtggcagcctctgtgggctctgccattccccgtgcctcacccaccctccttcacttggctgctcagctccctcctgctctttctgcccctcctcaattcacgcttgctttccagccctggccaaaaacagtgactgggtggaccagttccgggtgaagttcctgggctcagtccaggttccctatcacaagggcaatgacgtcctctgtgctgctatgcaaaaggtacctgagccctctcccttctcctcccttggatgggtccctggggcagagggacgcaggtgtctagaggcagtaaagggctcaggccctgggacaggagggatcagcagaggaacagacagcagctgacgtggctccatttgtcacctgtagattgccaccacccgccggctcaccgtgcactttaacccgccctccagctgtgtcctggagatcagcgtgcggggtgtgaagataggcgtcaaggccgatgactcccaggaggccaaggtgacttcttccaacccagccccttccttccatggccccaagctctcccccaagacttgtgatgaagaggccatctcctgtcaccctcactgcaggccaggtgaccgccctcttgcttcttttctccctcctgtaggggaataaatgtagccactttttccagttaaaaaacatctctttctgcggatatcatccaaagaacaacaagtaagtgggggtgggatggcagtggaggaggcacgggtggtctgcagccttgaggtgggtgggtgtgggccgagcccccgtcccagcacagacagacctgtccctgcaggtactttgggttcatcaccaagcaccccgccgaccaccggtttgcctgccacgtctttgtgtctgaagactccaccaaagccctggcagagtccgtggggtacgtgtacaccctgctgagcacccagcccgagggagcacgcccaatcccaggccctggggctgcttcctggcgctcagctttgcccctcggtttcccccgcagctctggagaactatctccggaccccagtgcgggtggcctggagggagggtggcgcggcagggtgagcctgaggagcagcttccaagcttggtagctgttgggccatgtcttcaactgacatcttactgggaaacgcgatggcaattctgtagagaacagagccaagtggccccagccagaggaaccagagctgcacttgggccccaaggctccagcgggaaaaccctgggtcgggatcctgttcctcccttgccagtggcgatctgagccatctgtgtgtcccctggcttctaggagagcattccagcagttctacaagcagtttgtggagtacacctgccccacagaagatatctacctggagtagctgtgcagccccgccctctgcgtcccccagccctcaggccagtgccaggacagctggctgctgacaggatgtggcactgcttgaggaggggcacctgccaccgccagaggacaaggaagtgggggccgctggcccagggtaggggagggtggggcaatggggagaggcaaatgcagtttattgtaatatatgggattagattcatctatggagggcagagtgggctgcctggggattgggagggacagggcttggggagcaggtctctggcagagaaggatgtccgttccaggagcacacggccctgccccatcctgggccttacctcccctgccagggctcgggcgctgtggctcctgccttgatgaagcccgtgtcctgccttgatgaagcctgtgccacctgcaagtgcccgccctgcccctgccccaacccccaccgaagagccctgagctcaggctgagcccagccacctcccaaggactttccagtgaggaaatggcaacacgtggaggtgaagtccctgttctcagctccgtcatctgcggggcttctgggtggctcctgccactgacctcaccggcatgctggcctgtggcaggcctaggacctcaggcggggaggaggagctgccgcaaggccctgtcccagcagaagagggaggcttcctgactgacacaggccagccccatcttggtcctgtcaccctggccccaactattaaagtgccatttcctgtctggactgcagtggatgtatctgcatgggcccctcccgtccccgtctcgctcccagcccaggaaagccaagcctttgtcacacatggtatctttatgagggccttgggtcataggtgtgcatcatagtaatactcggcaaggtcgggcccgtcccgcttgcgctgctgggccctagacaggaggggtcgaggccctcgcggccttgggtgcttggggaggatgccatagtctaaagagagaaaagagggcatgggtggtagggggcagctggctctgatggaactgaagtcacccttgaacagatgtggtttgggatgacaagcccctgaaggctggacttggggcacctcttaggggcgtctccactgtcagggatgggtaggggaaggggacaagagagatactaccatccaccaggccggaaagtggctgcgagagttccaggggggcggaaaatgcctcaggaacagaccgctgagacctgtgggagatgtcggggtgctcagccctggcccagaaggccaccgccacctccttgtgaatggggggatggctcagtgtgggggcacttggcaagccctcgaacgcccagggtaccagggccagccccactccagagaggggaggggcagcacctccaccatccggcccaagtgccctgccctctgtgccccaggagtcacctcagaggctgggagcgaagcagtgccactgccaggatgaggtggaggaagaggctgagcccagcccgggggtgcagagcccccagcatggcgagaaccatctcctacacgggtcctggctcctgtcgtccctatgctggcaggacggaacccgttgccggctcccagggccacctcacaaagggccttcattccaagcctgcgtcagcacctgccctggggcagggccagcagtctcccccgaggcttgtttttgttcttattgatgctgttggctaataggtgccaaacccgatcttgttctagtgttgctgtccaaggaataagagcacacactgtggagtcagatctcagttgaggtcctgaccttgcctcttactagccggacaagtcacttcatctctgtgtgccggagtttcctcatctgtgacgtagtccattacacaccctacagacataggccctccgaagagggcaggggatcctcaccacccagagccccagccattcctacagcaccccccccccacccccactggcatggcaggaggtccgagcaggtcccgccagctgaggagcccagagtggctctctcagccctgcctgtctcagggtctacgtgagagggagtgtgcaggctccctgtgtccccagctcagggcctttccctctccgctctctgcagcttacagcggcctgaggctggatggagggcttccagacatatggtggcagagctctggacctgcccctcaagtgcaggcttcaggagggcagggagggctttgttcactggaatctgcagccctggacccctggta

SEQ ID NO: 355 - DNA, 67097 bp, Homo sapiens
  source 1..67097: mol_type = genomic DNA
cctgcccagcaaaataaagtgcaaatcttacggagcaacacattttaagttcaggcctcaagtacttccagagacaaaagtcctggggacactggctcagaatgggggaaaggggaccctgggccaagagtcaaccaggatgacatgcagaatcagacctgcaagggctgcagatactgtagttatgaggcacacccaacgcttaaagataaatatgtggttggaagtataagagcctattaaaactgctagaatataagaaatcaaataggacaaaaacagaatcattggcagggtgcagtggctcacgcctgtaatcccagcactttgggacgccgagggaggcgggtggatcacttgaggtcagcagttcaagaccagcctggccaacatggtgaaaccccgtctctactaaaaatacaaaaaaatgagccgggcgttaatagcgcgtgtctgtagtcccagctactcaggaggctgaggcaggagaatcgcttggacccaggaggcgaaggttgcagtgagccgagatcgcgccatcacactccagcctgggcgacaagagcgaaacaccgtctcaaaaaaaaaaaaatcggtgcaattaataacccagtggatgggttaaacagattgcacgtagctgaaaagtaaccgaaaatctggactggcgcggtggctcacgcctgtcatcccagcactctgggaggtcgaggcgggcggatcacttgagatcagaaatttgagaccagcctggccaacatggcgaaaccccgtctctactaaaaatacaaaattagctggtctgtaatcccagctactccggaggctgagg[132 bp omitted]tgcagtagggagaagtgggcgaaaggaaggaggccacgctgctgggtttcaggatgagatgggcgttgagggtgcattcacagaatcccgggaggagccagctgagcggggaaggcatcaggagaggggaggcactgagcggggcgcggtgctgtagggaacggaggctcatcagggcggccgggattgaggcgcaggcgctgagccttcacctaagtccgccgaagtgtgcagagcctggagacgggatcgaggtcaccggaagcccacggttgcggggacatgatcaagctacagcgcgctgggggaagcgaccactgccgccccgcggatcccaccggcctggccgggagctccctctgcccggctcacccgcgcttccggcccgaagcccggcttcctctgacgtcacggcccctgcgccccctggcggcgcggctgcggcgggacgcgcgggcaccgccccctccggctggagggcgggacttccggtgagtgagtgacgggcgcagcctcggcagcggcggcggcggagccctgaggcgacagcagctgcgggaggcgacgggctgcggcctgcggaacctgaggcagctggggagggccgggcgcgccggccggatagcgagccgcgctggcggcggcggtggccgcgatgatggagatccagatggacgagggcggcggcgtggtggtgtaccaggacgactactgctccggctcggtgatgtcggagcgggtgtcgggcctggcgggctccatctaccgcgagttcgagcgcctcatccactgctacgacgaggaggtggtcaaggagctcatgccgctggtggtgaacgtgctggagaacctagactcggtgctcagcgagaaccaggagcacgaggtggagctggagctgctgcgcgaggacaacgagcagctgctcacccagtacgagcgtgagaaggcgctgcgcaggcaggcggaggaggtgcgtgggccgcgggacccgcccgcatccccgtcccggacccccagccagccccgggccccggacccaacacccgtcccgaccccagaccccgctccggcaccccggaccgcgggacccctggacccccagaccccgccccgagacccgcctggaccccatatcccccgccccgggacttccccaccccctctgcccgccgtgagacacctccctagagcactcccccgcctgccccgggaccccaccccgactcccggggacccccttttccgcccaggcctgggccctggccccctcctccgtgcccccagccctgaatcttcagccccaaacccgatgtgcctggcgtcatccccggggagctcagcttcaaagccaggcctcactctcccctccccacccacctctgcatgacaattgcctttgctttcgtgcgtgtgttcagtcaaaaccgtttcccgaccccaagtgctacctctgttggctgccattctaaacccatctagaaaaggaatcttttggtgttcttagggggctgcagccgtctgtggatgatgttggagacctttcccttgtccctaatcccgtattttgaaggtctgtgacacgggtgaattgggtggttgatgtaaacacagaacaaggccgcaggcgggctgctcctctgtcagcagaaggaacactcgagtttctggaggtgatgtctttgcccccttggttccttgcttggcgagattgttagctgatgtagccagggctgagaaactccactctggcttctgaggagttaacagtctgagtttgaagcgtttaattctgtgctaggatgtctccataacctggaaatcgcttgtctgtgaagcagttacaagagccgggccctgtggggagcaccacttagcttcattcattcaccgtcagatactgagctcggcctgcctgtgtgtgggcccagaacctcgccctttgtcagaaacaggttcagggaggctggttcccatccctgctttgcctctgtgaccttggcctgtcgcctgcctggggttcgattttccatcaaaggagtgaattgcactaggcgatctccaagcccagaaattctctcattctaggagttaggtaatgctgtttgacttatgaatagaagtgtcttaggaaatgagcttcaattccttttcaattaattcggcttaacacattcttgactttaataggaaaataaaagattgtgtcagtattttggctttttctgaaaccaaggtgatttatggcctagtttggtttaaagcgtgtttataaaaatcataacagtatgttgtatcattcctcctttcctgtggtttctattgcgtttgggcttcgtgtctgtcgcgaggtggttatgcattgattggaatgccccggttccagcaaagctgagttaaagctctcaacctaagggaacgcaaaggttcatggattttggagctcagggtgactataggcattttactgggaaggaaacttgtcctgagaagtggaggggctgaaccaaggtcacccaccccagaagtgcccagccaggatgcagagtgaacccgacaccggcctgggcacttgcttccatgtcaggcagctgcaggcaccggagggctgctccccagaagcctggagtgccagggctgccctcgctcagctgtggagctgtggctgccccctgtgctgggcaccgccctccactgctctcccacactcagtggcctgacctggatttcaggtgggtttctttttttcaccttgtacctgtgtggtcagtatagtggacgagaaggaactgaaaggagaaaatcaagatggacaacgttaaggctaggaattataaccttgccgcttaaaaatgagctgtgcacaggataggcgctgcccagctctgtgcggttcacatgcaagctgctgtgagtgcatctgccctcccccagggctcctgctgaaccaagctggcgggtgtgcgtgtggtttgcaaagctatcacctttagtctgagacccaccattgccccagcgctttagagaagctgcaccgagagcttcgggagccgagccccgaagccagccaatgcttggccagcatggaggctatgattaaacgctaacggggcgcccttggaaagacctcagggctttacaactaaggaagagggctcgatgctgtcaacatttggcatgcctactcctctactgaatcaagcagaccttcatttccaactttgtagaccattgtgccctgtgggtcggcgtcttttctaggcagggacttgtgatcacatagacgtgtgtctgataagaggggagcgggacgtcacacgctgcaggcgtgtcttgttgcagaggagctcctgggtgagctgtcagcagaagctccgtccccagccactctgctcaagaaggcttagtcagagatgggtaacctgagccactgcagcttctgagcagacagaatccgcagggttttataaaaacctgagcagagcagacatccctgttcccatcttcttgccggtcattaccacagtgactcccaatgtgctctgataacaggcagctgagtgtatgagagtgacaggagctagagagggtggggtctcccgagagactgacccaagccgtggagtctgcagaccccagcctgagtgtcagcccggccctcaggagccacacaccctgggtccatcctcttcccctcgctgggctgcagtggccgcggactttgcaagtcagtttcatctcaagatccaagcaccatcactggctgttggttgcctggagaattgtgggcaggcagatgtagcagagtcagggcagaacccttgacgggttctcagggccgccgtggacggcaggcaccggacattgctagccgcctaccagacagtgcagtttctggttgtgcaggctctgatacaaagttttttaaaaccctcaagttatttcccagtggaaaagaagaaggtgggaaacagcagctgaacggggtgggggctggcaaggagcagatgctgcctccacacgcaccgtccggtgcagctccagaggagggccgggcagagccaccacgtttgccgggcttacccgggcagcaaagagcccttctcccatagtgatcaactgcttagcttacaagaggaaaaataaggtgtgagagatgacatgtgaatattagtggtcattatttgccttaaaatcttcttaaccctaaagaaactgctgctggtaacaccccccaggctcatggcaggcagctggagtgggtgttctctcaacaagcccagatggtgatgtttgctgatcattcggcatttgatgctatgtaaggaaaggatgcaagggaagacagttttatccaaaacttattttttccgagttaaataaaagttaccggccaggcgcagcgactctcacatgtgtaatcccagcactttgggaggctgaggcaggcgagagatgaggtcacgctatgttgcccaggctggtctcaaactcctggactcaagcaatcctcccacctcagcctcccaacatttgacattgaactcctgacctcctcatctcaggtcaggagtttgagaccagcctggcgaacctggcgaaaccctgtctctactaaagaaaaaaaaaagaaaaaaaaattagccaggtgtggcggcaggcccctgtagtcccagcactcgggaggctgaggcaggagaatcacttgaacccaggaggcagatgttgtggtgaaccaagatcataccactgcactccagcctgggcaacaagagtgagactctgtctcaaaataaataaatagataaaaataaataaataaatgtcatccatttcatagactatttgggtaggattcagctggagaaaacaaacaccataatcccgctctacagagatgatcagtctgccatttttccttctttttttctcctctgcgccagacgatctgcaggaagtcttttccatcaatgaattaagatgctgaatcagaaatttttatttttgtttttcatatgacaaatagtaaatccaccactgcttggccagagtatgcgatttcttttcctgccatgttatgatattaagaacagttttttaaaaaatgttttttaaatgaagctatcaagatggggctgccagagctgcctttcctaggtgcctctgaaagctggcctggtgtagctgtaccactcaccaggagtacagcagtctccctaaaaagtggagcaaatacatgtaggaaccatggagaaggaggtacctgccagccagagagaacacgggacagaggccgaagtggcccggaggccgctgggcgcagcctgcccctctgccgctccgctgcgggagcccccgggccacgctggcagcagtcagacagggccgagagctgagagaagtcagttcttccaaaattaagatttctaaatgaaatatctgtttcatttttacgtttttaaaaaccattttgaaatatgtacagaaaggttgcagaattaacactcctcacccagcttcccaagtgcaggcgtcttcccacgctgctttctctggctgtgtaaggggctcaggggtccctgtgtccttgttgtgtcctgtgttctgcggtggcccctcgttctctgctcttattgaccttgaccattgcgacaacacagttcagtcactttgcagctgtgcctcagtctggctcatgggccctggggaccagatatggagcatgtcctcaggcctcagcaggaagacccatggcatgcagagcctcctagatccttaatctgtgccagatgggcatcaggtgaggggcacaagatttttggatgggcccctttcccaggttcccatttattaccagggctggaggatgagctgttagtgcatgaaaatcactacagaagcttgcccaggagctgcatggggtgccggctctccggacttgttttcctttgccctgttgaaagttggggtcccaacgctgggcgcagtggctcacgcccgtaatcccaacactttgaaaggccgaggcgggtggatcatgaggtaaggagttcgagaccagcctggccaatatggtgaaaccccgtctctactaaaaatacaaaaattagctgggcatggtgatgcacacctgtactcccagctacttggaaggctgaagcaggagaatcgcttgaacacaggaggtagagcttgcagtgagccgagattgcaacgctactgcactccagcctgggcaattgagggagactccgtctcaaaaaaaaaaaaaaagaaaaaaaaagaaaactgaggtcccgagctccccttgtcaccccaagtatctagccgccactaggtcctggtgttcttttggcctcaggagttctttttttttttttttttttttcttttttgagatggagtctcgctctgtcacccatgctggagtacagtggcgcaatctcggctcactgcaagctccacctcccaggtttatgccattcttctgcctcagcctcccgagtagctgagactacaggtgcccgccaacacgcccggctaattttttgtatttttagtagagatggggtttcaccgtgttagccaggatggtctcgatctgctgacctcgtgatccacccatctcggcctcccaaagtgctgggattacaggcatgagccatcgcgcccggccagcctcaggagttctttaatgtccccacttttcatctcctttgctgccttctgcttccagtcaccaccatcccagggtctcccggccactcccaccgccgccactttgccagcccagagaaccctcacaaagcatatctggtctctgagtgctagggtgaattccaggcagggggattagctgattgctctcctggggcagactggacatctcaggtggtgataacatgaggggatctgagtgacaaggtgggccaggacactgggtggacagagtgaggctgtcttccccaggtggccccccactgggcccacctctcaccagcctcatctgcctctggtcttctggctgccccccattctgcagacctgcagttcctgcctcctagaccacctgcccccacccctccctcggggtttatctggctagttcccgtctctgccggattcgctggtgtctgcctccgcagtgcacctgcagagaagcccccatcacccactctgccgcccctgcctggggagctgggcccccaccaggcctctctcccggcttccgcaagttaagctgctccctgccaacaaggggccggcaccctttggttcattcagcctgagcctgttgtttccttttctcggcacacccggagatgctggccatctgtgtgtgtggataaagggaagccggctttcctctgtctctgcacacatctcaccaaactgtgcagttccggaaggtcaaggactgtctctttggagcagcctttctgacagaacgttctgggatgatggaaatgttgtatttggtgctgtccacttcagtagctgctggccacatagggccgttgagcattttaggcatgactcatggaactgaggaactggatttttagttgtatttacttgtttcggagatgaggtctcgccacgttgcccaggctggtctcaaacttctggaccgaagcaatcctcccatctcagcctcccgaatagctgggactacaggctcgtgccaccatgcccggctgtgttttattttaattaatgtaaacatgtggccagggcttccatactggacagtgtggctgtgggcagtctagctgagctgcctggaagcaagggcagatggtgagttactcagcttcatgcaagaaaggaagatgcttaaagggtgggtttgtttcctgtttaatgaacattttccagaaagaggggagatcccgtagcagtgggtttcagatacaggagaccagacaggagaaaatattgtgagatgggaaagtggatgccagcaacaggaaacagcagagaggggctgaagttctcgaaaggccaagaagagcctggtgggaaaccgctcgcacctcaggactgcctgtgctcagggcacaggatcgactttttcgccttgggctgctttttgttttctttctgtgggtaacaattttattgcagtatcattgacatacactgaactgtacatacttaaagagtacaatttgatgagttttgaaatacgtataaacaccagaagccatccctgcagtccaagcagcgtagacgcccggaccccagagttccctgtgtcctatgtaatccccctccgacccctccttgccccacctgtccccaggtaaccactgacctgccttcagtcactgtaggttaatttgcatcttctagagctttgcataatggcctcctgcagtgcgtacgtggtttcctctgacatcttccactcggtacagtgattcggggactcacccaggctgtgtgtgtccttcccccatggccaagcagggtcccagcagtgccgtttgtccatccgcctgcctgcaggggagctgggcggcttgtttttacgtaaccttcacgcatgagcggtttgtaagcccgctcaccccgttggcagggtgttgggccaagcactgctctggggcaggctggcagtgaaacccagagactagaatccgcttatgaggggggtgcgtctttgcggagacccttagagcccacagcatcattactctggtgcattttcttttgagccactgttacggcaagagatccagggcgtgccacgtgaaacgcgacagggcctttcctcaagacctctcctccgtgtggtgcgtttctcacacagggtctaggacatttcaattcttgttatcaacaaccagattcaaaacttgccttttgttaaagtttcggggggccccttcctccccaggcctctggggagtttggggctcctgttccctaacctttcctcagccagcctgcccatcacctttccttctccccaggaaatgaattcccagatatacgcacagtcccagtgggcccttgcacacgtgtgtctctatgtccctgcctcgggttagagcattcatgttttgagagcagggaccctttggctactgagaagagtgaactgaggcacggttagcaggcctctcgttcagtggaaccagagggagtcggaggttggggctgattaggaagtttcagaagccaatgtaaactcctaagaatgcaccagagaataaaagtttacttgagaataatttttcccagggagatgtttcataggatgggacacttaacttgaggttttggttttatcttcatttttcttccgctggtaccaaccatataaatttatatatatatttcccaatacaaatgtatatgtactagtaagacagatgggaaatatatatatatctatttcccatctgtcttacccattcttgaaatcagttcgtattcaaccagttgggatttgttttacgtggacactgaacccagccatccctttcacagaacgtgaggaagccttgcttttcaacctggtttttggagtcccgagctagtggccagctctctcagccccacacgtaatacctgaatggagaaatgtccttccctcgacccgtgtcccgtccagcaggcttcaggggcagctttgtaactccagagccaccccctgcacgtcctctctctgcattttagacctaggtggccaggcaattgtgggaaatggaaagagctctgactgccccctgccagcccagggtaaccacagccatgcgaggtccctgcccgtacctgggaactagccatgaagggcatctgccaggcacgtgcccggcacctgtctgcctgcttaagataaaagaccaaaaatgagcgtttttcctttggaaattcatactacaccctcattcccagggaaggaaataaattgatcggtattgcacaagaacgagatctttgattcgtgtcaagattcgtttctaaccaaccagccagagctgaattgtttctcgctggtgagcctggcctaacaaacgtatgagaggagaggtttggattttttttttttttgagatggagtctcactctgtcgcctaggctggagtgcaatggcgtgatctctactcactgcaagctctgcctcccgggttcaagcgattctgcctcagcctcctgagtacctgggatcacaggcgcccaccaccacacccagctgattttttgtatttttagtagagatggggtttcaccatgttcgctaggctggtcttgaactcctgacctcacgtgatctgcccacctcagcctcccaaagtgctgggatttcaggcgggagccactgcaccggccgaggtttggatttaatgtattactttactcagcaggaaagtgtccatgggttgtgaaagttaccaaaagcctgttgatcgccctgtgaaagaactttcctggccattgctctgacattctgagtccagaatactgtcatcttgattttatattggacattaaaagtcagtcactgcgttaactttgtttacatataaaaggaaggatgatatcattctatggaatactgaaaaaactggcttggattactagattttcgaagaccctatgctctcaggtcatttctttttttttttttttttgagacagagtctccctctgtcatgcagtggcgcgatctcggctcactgcaacctctgcctcctgagttcaagagattctcctgcctcagcctcctgagtagctgggattacaggtacgcaccaccacgcctggctaattttggtatttttagtagagatggggtttcacacgttggtcaggctggtctcaaactcctgacctcgtgatcctcccacctcggcctcccaaaatgctgggattacaggagtaagccactgtgcccagccaggttatttcaatatgtatcttgaaattcaccgaaaatgctgggcatggtggctcacggctctaatcccagcactttgggaggctgaggtgggtggatgacctgaggttaggagtttgagaccagcctggccaacatggcgaaaccccgtatctaccaaaaatacaaaaattagccaggtatgaccaggcgcagtggttcacgcctgtaatcccaacactttgggaggctgaggcaggcggatcacgaggtcaaggagatcgagaccatcctggctaacacagtgaagtcccatctttactaaaaataaaaaaaattagccgcgtgtggtggtgggcgcctgtgatcccatctactcaggatgctgaggcaggagaaacagttgaacctgggaggcagaggttgcagtaagctgagattgtgctactgcactccagcctgggcaacagagcgagatgccgtctcaaaaaaaaataaaataaaaattagccaggtgtggtggtgggtgcctataatcctagctactcaggagactgggaggctgaggcaagagaatcacttgaacccaggaggcggaggttgcagtgagccaagatcgtgccactgcattccagcctgggtgacggagtaaaactccatctcaaaaaaaaaaaaaaaaaaagaaagaaagaaattcaccaaaaagcaaattctgaaaacataagttgaatttaattttcaagcagagccctttggtcgtgggagggatggggaagtacatcttaaaaacatgtctaaaaagggaatcctgtggcatattggtacctagatgtgagagttgtttcgtgtctcgactgaggaacgacacccatgttttccttcattttgtaatctcaagtcattgctccttgggatgctcaaaggtgacccataggtggcctctcatgtccagatgccacacagcatttcactagactcggttagataggtggtcgtgtcaaatacacgctgccctgcagcatggatcacgagcacgtgtacagaaacctttcactttgctattgtcacaccttcagtaggtctctgggaccaagatactaccgtgctgtattctgggtagttcttttatttttttataatctagtactatgcaggcccattcaaaaaaaatgctgatagttaaaactttatttttctcagctccgtttatattttgtaatcgtgctttatagacttaaattcatctctattccccaagtccccaccactgaaaattcttggttctctttttttttttgagatggagtctcgctctatcgcccaggctggagtgcagtggcacgatctcagctcactgcaagctccgcctcccaggttcctgccattctcctgcctcagcctcctgagtagctgggactacaggcgcccgccaccacacccggctaatcttttttgtatttttagtagagatggggtttcaccttgttagccaggatggtctcgatctcctgacctcaaggttcgcccgcctcggactcccaaagtgctgggattacaggtgtgagccaccaagcccggctgaaaattcttggttctcttaaatcagaagtaaatgatttttttttttttgaagcagagtttcactcttgtcactcgggctggagtgcaatgtcatggcctcggctcactgcaacctctgcctcccgtgttcaagagattctcctgcctcagcctcctgagtagctgggattacaggcatgcatcaccatgcctggctaattttgtatttttagtagagacggggtttcaccaagttggccaggctgctctggaactcctgacctcaggtgatccccccacctcggcctcctaaagtgctgggattacaggcatgagtcaccgcgcccggctaatgatctttaaataaaaatattttctaggccgggtacggtggctctcgcctgtaataccagcactttgggaacccaaggcaggcagattccttgaggtcaggagttcaagagcagcctggccaacatggtgaaaccctgtctctactaagaatacaaaaattagccgggcatggtggtgggcacctgtaatcccagctagtcagaggccgaggcaggagaatcgcttgaacctgggagatggaggttgcagtgagccaagatcgcaccactgcacaccagcctgggcaacagaaccatctcaaaaaaaaaaaaaagaatgttccagcatccacccccagaagccccatcagaggactcttcacttcctcaagatgagttttctctcaccccaagtctagccctagcatcttctcactgaaaacgactcaacattaggggctgggcgaggtggctcacgcctgtagtgcctgtggttcaggaggctgtggcaggaggattgcttgagcccagtaggtaggtcaaggctgtagtgagccttggtcatgctgctgtactccagtctggataacagagcaagaccccgtctcaagcaatcttcctgcctcagcctcccaagtagctgggactatgggcatgcaacactgtgcccagctaattattttttgtagaggtaaggtcttgttatattgcccaggctgggctcgaactcttggcctcaagtgacactcctgcctcagcaacccaaagtgctgggattacagctgtgagccactgtgcccagcctgagacccaatctttaaaaagaaaaaaaaaaaatggccccttcctaagggacagagacctggtgctttcagacaggtgaaatgcataaccaaaaaataaatatgtatgtcggtgattcaaaatgattctcaaatcaatctagaaggagaaattaggaataaccaggaaaatgttgaaaaggaagatgtaagagggagagcagatattagatactagaaagtaccataacaccacaacaccagtttaaaaacctgtggtgctggctcagaaacagactaaaatgtagccaggcacagtggctcatgcctgtaatcccaatactctgggaggctgaggggggatcgcttgagcccaggagtttgagatcagcctgggtaacatagggagaccccatctctacaaaaaaaaaaaaaaaaaaaccacaaaaattagcccaatgtggtggcacgtgcctgtgggcccagctactcaggagactgagatgggaggatcgcttgagcccgcgaggtcaaggctgcagtgggtgacagagggagaccctgtccccaaaaaattgaaaaataaaagtaaaagaaaaaaagcctcaaaaacaaaccaaaaagtataaaagaaagaaatgttgagagttctacaaaagggcactgtcccactttttagggggaagtgtaagttgggacaccctctgaagagtcacttagcagtgcatgaccgcagcctcagagagcaggaagccagcaggtgaatatacaaagacgtgtgtgcacacagcttttgtttgtttgtttttcttttgagatggaatctcgctcttgttgcccaggctggagtgcaatggcgcaatcttggctcactgcaacctgggttcaagcaattctcctgcctcagcctcctgagtagctgggattacaggcgcacgccaccacgcccagctgattttttgtgtttttagtagagatggggtttcaccgtgttggccaggctggtcttgaactcctgacctcaggtgatccacccgccttggcctcccaaagtgctgggattacaggcatgagccaccgtgcccggccagctttttatagtagcaaacattttaaagcaacctgaaagtccataaagagataatggattgagcaaactgtgctctacacacacactcccagcagaacacacacctgccaaaaatggaagtggtcgagtacgcctgttggtgttgaaaggcatttcagtataaatcagtgaataaatcaggttacaaaacactgtgtacaagatgatcgtacatctgctctacacacacacatacaaatccagaagcacgtcacacaattttaaccgaccctatagaccgagactcataatttaaaattttttctgtttttacctaacactgattttcctgcagaaacatacattgtttatataattattttcattttttatataacaggaaataaacttacctactttaaaaaatatccaggccaggccgggtgcagcggctcacgcctgtaatcccagcactttgggaggcagaagcaggcggatcacgaggtcaggggatcaagaccatcctggctaacacggtgaaaccccgtttctactaaaaatacaaagaattagctgggcgtggtggtgggtgcctgtaatcccagctacttgggaggctgaggcaggagaattgcttgcacccagggggcggaggttgcagtgagctgagtcatgtcattgcactccaacctaggcaacaagagcaaaactttgtctcaaaaaaaaaaaaaacaaaacaaggctgggcatgggggctcatgcctgtaatcccagcacttgggaaggccgaggcgggtggatcacctaaggtcaagagtttgagaccagcgtgaccaacatggaaaacaccatctctactaaaaatacattagctggatgtggtggcgcatgcctgtaatcccaactactcgggaggctgaggcaggagaatcacttgaacccgggaggcggaggttgcggtgagctgagatcgtgccattgcactctatctcaaaaaaaaaaaaaaaaaaatcctttgctcatgcctgtaatcccagcactttggaaggccaaggcaggaggattgcttgagcccaggagtttgagaccagcctgggcaatatagtgagatcctatctctacaaaacctttttttttagagagaggatctcactgtcatctgggagtgcagtggtgccagcctcagggctcactgcagccccgacctcctggggtcactgcagcaccgacctcctgggctcaggtgatcctcccaccacagcctcccagctcactggaactacaggcacatgccatcgtgtccagctaatttttttgtagagacggaatttcaccatgttgcatctaactcctggagtcaatcaatccactcgcctcggcctcccaaagtactgggattacaggcatgagccaccgctccgggcctataaaaactttgttttttcgttttgttttgttttgttttgtttttggagactgagtcttgctctgtcgcccaggctggagtgcagtggcgtgatctcagctccctgcaacctccgcctcccgggttcaagtgattctcctgcctcgccctcccgagtagctgggactacaggcgcccgccaccacgcccagctaattttttttatttttagtagaaacggggtttcaccatgttagccaggaaggtctccatctcctgacctcgtcatcccccccgcctcggcctcccagagtgctgggattacaggcgtgagccaccgcacccagacaactttttgttaaaaattcttatcagtcgattaatagcatgtgtgtgttcttcatatgctagttagccacagttaattcaaaatcacttatttttattttttgtaccgccgcacaaaaaagtcatgcattttctcagctgtggagtgtttgtttttcttccttttccttaagttgcatgtgatgcccataacacagactcttcctgctgcctcctgctccctgcctgcccctcccgcctctgtggttttctgccctctcagtaactgcacagaatgagtcacctcttgggcagagccccagtggtttcaacacaaagacctttttagaagctgctgctataggaagaagcgtcgaggagcctagtatccgggtgggagagtgggtagagttattatagggaacacagctgtggccactacccatggatcttccagatcccaaaagatgaaatccaccacc[450 bp omitted]cgtgagccaccgtgcctggccaattttttttgtttgtttgtttttgtttttgtttttgtttttgttttttgagatggagtcttgctctgtctcccaggctggagtacagtggtggggtgatctgggctcactgcaatctccacctcccaggttcaagcgattctccgcctcagcctcccaagtagctgagattataggtgtgtgccaccacacccggctaatttttgtattttttagtagaaacagagtttcaccatgttggtcaggctggtctcgaactcctgagctcacatgatccatctgcctcagcctcccaaagttctgggatgaggcaggagaatcgcttgaacccgggaggcagaggttgcagtgtattttttagtagaaacagggttttaccatgttggtcaggctggtctcaaacactcactcaggctggtggctcacagcgtgagccactgtgcccggcctctacaaaaacttctttaaaattagccaggcatggtgacacatgcctgtagtcccagctgctcaggaggtggaggcaggaggatcatttgagcccaggtgctcaaggctgcagtgagttgtgatcgcaccactgcagtccagcctcagagacagagcgagactctctcttaaaacaaaacaaaacaaaacaaaacaaaaggccagttgatatttatacttcttccagtgaaatttcttgataatattccccagttttctactctgtaaaaatgaggtgttaacagctccctctctgggctgctgtaggaactacacttatggcatcgatgcccggccacacctggggcctcactggcccccaggctcctcagaccttttatgagctgcttttattttgcaaaatgttttcttttcacttggtttgataataattttgtcctgaaacttaccacataaggttaagattccaaacctagaccaatccccctgcctttttatttaatgactaggagcaagactgtgttgctggttatcccagtaacgatggtgtcctgagctgagctgcaactgacatgcagaaaagtaggctcaaccttgttcttaggcgtggagttgaggggagtcagatgactccattgcaaacaggactggctgtgtgctcatggatcccagtgtaaaaatggaaacacagggctctatgttcaaaaattagcaacatttcaagatggcagcagccaagccaagcattgggccttctgagtgcagggccccgcattgctgcccgggtctcatgcagccacgaaggcagccgtaattggaaacaacaggctcccttcacagcaaatcctcccgggagaggagggtgcaatcatgcagtcctggagggctctcccgccctgccctcatggctcctcactgtgcctgaggagggtggtggccacagccacgtggcgggaagcccccattccggcctggccatgggccagcttgtggccctggggacatctttggcccctgggccctcaaagcctgcggcccttcaagtgaaaggcggctgctccacactcactcctgatgactgctctttccctcccttccatgcacagaaattcattgagtttgaagatgctctggaacaagagaagaaagagctgcaaatccaggtggagcactacgagttccagacgcgccagctggagctgaaggccaagaactatgccgatcagagtaagtggctggcgggagcctggaggcgcgcttgatgggcgctgctctgggacggctctggttggggtgggcatggagcgccttccacacaaggggacgagaggaagcccagtgggagcctcagccatgtattccagctctttgtactgctgcctgtttctgtaatgggccccagattgtgtgtggaaataagtaaatcaggccactgtggccccatagcacttttgcttcagagtgaattctgacccccagatcacaagtctgtggtcctgaaggtccttcctgaatcttttgaacagagctcctgcagcccctggggtccccacctcttcacactgctgaggagtgatggctccttctcaggcaggagggtgggcccgctggtgtagccccattgaagtgacagcgcctaggtggggggcacagctgatcagggtgtctgtcccctgcaaggcgaagtagcagaaagggtttattattattattattattattattattattattataagaacagttggtttacttacctttaaaagtctttgcttaaactctactgtcaatgttttaggccaggcgtgatggcatgcgcctgtggtctcagctgggctgaggttgatactgccgtgtgggcacacagagacctcatctcttaaaaaaaaaaaaaaggccgggcatggtggctcacacctgtaatcccagcactttgggaggccaaggcgggtggatcacctgagcttaggagtttaaaaccagcctggccaacatggcgaaaccccgtctctataaaaatataaaaattacccgggcatggtggcgggcgcctgtagtcccagctactcgggcaactgaggcaggaagatcgcttgaacccaagaggcggaggttgcagtgagccaagatcgtgccactgcactctagcctgggcgacagagtgagactccatctcaaaaaaaaaagaaaaaatttaaaaaagaagaagtgatgatttcctgtgtaattttccttttctgtaattagatgttttgttttgtttggagacagagtttcgctgtttttgcccaggctggagtgcaatggtgcgatctcagctcactgcaacctctgcctcccgggttcaagtgattctcctgcctcagcttcccaagtagctgggactacaggtgcccgccaccacacccagctaattttttgtatttttagtagagatggggtttcactgtgttagccaggatggtctcgatcttctgacctcgtgatcctcccaaagtgctgggattacaggcgcgagccaccgcgcctggccccagatgttttaatgattgaaaccaatcggctgcggtttccctagctacctcaacagcaggttcctttatctctaaaaagttaagatcaaatttgggaaagaaactgttttgatatgttagacttactcctatccccagccaaggcctaaaggctgctgtgctgacaatgacctgctgacgagtctgggggccagagggtgaccacggtggcagcttccacacacatggaaacacactggcattcacaatgcaaagcaaacctaagacccgtgctgagcatacctaggtaatgcctttccataattacagagtctctcctggtccctcggctttcagtacatttcatgtgtgaaacattctcagctctcttcttagaaggagaaaaacataagctcaaattacaggcaaggctgggaacagtggctcacacccataacttccacactttgggaggctgagggggaaggatcccttgagctcaagagttcaagaccagcctgggcaacctggtgaaaccccatctctacaaaaaatacaaaaattagccaggcacggtggctcacagacttgtgggcccagctactcgggaggctgaggtagaggattgctcaaacccaggagggagaggctgcagtaagccttgatcacgccactgcaccccagcctgggtgacagagtgagaccctgtctcaaaaaaaatcaaattacaggctgaggctgttcactgggccagcaccaggagttggggccagatgagtgcagagagcaggccccgggctccctccaggtggtggctatactctgccccagcgggagctcacagagaggctgtggggctctgacctcacacagacaggtagcctctcccggggccacagccgttgccggggtcagcacaagcctgggatggctggttggctccctcctgcagcagccagttacatgtgtgcagcgtgcagtgtctataactcgtgtgctgtgtgcagtgtctgtgtgttgtgtgctgtgtgcagcgtctgtgtgtcatgtgctgtgtgcggcatctgtgtgagtcatgtgctgtgtgctgtgtatgagtgttgtgtgctgtgtgtggcgtctgagttgtgtgccgtgtggagcgtctgtgtgagtgtcatgtgctgtgtgcggcacctgagttgtgtgctgtgtggagggtctgtgagtgtcgtgtgctgtgtgcggcatctgagttgtgtgctgtgtgcggcgtctgagtgacgtgtgctatgtgcgggtctgtgtgactctgctgtgtgtagcgtctgtgagttgtgtgctgtgtgcagcgtctgtgtgagtgtcgtgtgctgtgtgcggcgtctgtgtgagtcgtgtgctgtgtgcagcgtctgtgagccgtgtgttatttaccatgtgtgttagtcacatttgctgcatgcagcgtctgtgagtcacatgtgtcacgtgtcatgtctgtaagtcttgtgttgtgtgcggtgtctgtacatcgtgtgtcaggtgcagcgtctgtaagttatgcatgtttggtgctgtgtctaagtcgtgcgtgtgaggtgctgtgtctaagtcgtgtgtgtgaggtgctgtgtctaagtcgtgcgtgtgaggtgctgtgtctaagtcgtgcatgtgaggtgctgtatctgagtcacgcgtgtcaggtgtgatgtctgtaagcacctcaggctccttagggaagaccagactgactgctggcgctgacgcctatgctgctcctcggggtgagatccccgcgccagcagtgcagcttccctgggtgcctggtagagatgcgagagcccagcgtaggccgccgcggcctccaaggatgtgccaggccagttaccccccagatcacagagcaggatggccaaagtgagatgttgagccacataatctgtggagtcatttctaaacagacaccagaaagctggggaggatgggagggcaccacgccgaggacagggcacaagctggtggagcaccttaccagctgagtcccggccacgcactccctggggctgtctctcacctcgtggcgtcagccctccccattggtgggctgcaggacagagctgaggtttgaacacagctgtggaggcggccatcaggccgggggcacgcatgcaccattggcgggacatagagtggggtcccctggctgcggctgcccgtcggcctgtcatgctgcttctgtgtctcttgggcagatcacgtctggggccagagaggcccgtgttggtgtcacggggggcctcccgtttaagggagacatgactgtcagcccagaaggcacatagtcatgattggcctccccagccctcggcgtgtgtgagggacctcgctgcttgttctgccagacacgaccctttgacgtgtccaggaggttactcactttgaatcccgcctcctcccgcaagcttcttgtgcacctgttgcctgtgcctggcgtgcctgggttttgcctgcatctcagaagcttgtggctgactttagcacagagagcgcctgtgggtttccccacccccatatttaactcccaacagagctgagtgttttcccatggcacagggcacacacagcagccccccagacggccttcacagagctgagtgttctcccatggcacagcacacacagcagccccccagacggccttcacagagctgagtgttctcccatggtacagggcacagcagccccccagacggccttcacagagctgagtgttctcccctcgcacaacgcacgcagcagccccccagacggccttcacagagctgagtgttctcccatggcacagcgcacacagcagccccccagacggctttaacagagctgagtgttctcccatggcacagcacacacagcagccccccagacggccttcacagagctgagtgttctcccatggtacagggcacagcagcccccaagacggccttcacagagctgagtgttctcccatcgcacaacgcacacagcagtctcccagacggccttgcacttgccgggctgctgctggttgcctcaggacccagagtcccagccttgtcctggaaccccctccctctgtggttacaacccaagagttcagggccatggagaagcgtcttgtgcggctcagacagtgattgtgttttccagtttcccggttggaggagcgggagtcggagatgaagaaggagtacaatgccctgcaccagcggcacacagaggtgggcgcccagaggcaagcgcggagacgagggttggagacagggccgcggcctgacgcctgcgactcttgcggaccgtggttttcttccctggcatgtcccttttctagcatttgctgccaggcttgaaggctgtcagccccaggctggttagattcccctccaggacgctgtcttgatttctgcctgcacagggcagccggaaaagcctcacaggttagaggggacggagacagccccccacggcagcgctaatgcaggcgtttccctcctcgcagatgatacagacctacgtggagcacattgagaggtccaagatgcagcaggtcggaggaaacagccagaccgagagcagcctgccggggcggaggtacgcggggcgcggcggggtggaggtacgcggggcgcggcggggcggaggtacgcaggacgcggcacatgccagggtcgtagtgcttgttatggcccgcgctctgggctcaggacgacagggaacactctggagacccaggaggagggagctggttggagcgtggctgagcagggatgtgggggggcggccctgggcgacggacatgtgtcgagcccgtgtgtcccttctgctcggtccacaattcagtcagggaggccccgggcagcttgcgcatatttaacccttactatccacagattctgtgtttgcaaatgtatctactcgctaaaatatatctgtgacctcagccgggcacagtgacttatgcctgtaatcctagaactttgggaggccaaggcaggaggattacttgagcccaggagttcgagctcagcttgggcaaccagcaagatcttgtctctacaaaaaaaaaaaaaaaaaaaaaaaaaaaaattgtttaaaaattagctaagcatgaggtggcacttctaggacatactgcctcaaataactacctgtagtcccagctactcaggaggctgagagaggaggatagcttgagcccaggggctggaggctgcagtgatctacagtcgcgcccctgcactcccacctgggcagcagagtgagccccgtctctaaaaaaataaaaaaagaaaatcatctgctcatgtgaggtcaaagaataaacaacaaaaaagaggctggtatggtggctcacgcctgtaatcccagcactttgggaggccgaggtgggtggatcacttgaggtcaggagctcgagactagcttggccaatgtggtgaaaccccatctctattaaaaatacaaaaattaagccgggctcagtggctcacgcctgtcattccagcactttgggaggccgaggtgggcagatcacgagatcaggagatcaagaccatcctggctaacatggtgaaaccccatctctacgaaacactcctgtaatcccagcactttgggagggcaaggagggcggatcatgaggtcaggagatcgagaccatcctggctaacatgttgaaaccccatctctactaaaaatataaaaaattagccgggtgtggtggcgggcgcctgtagttccagctattctggaggctgaggcaggagaatcacttgaacccgggaggcagaggttgcagtgagccaagatcgcaccactgcactccagcctgggcgacagagtgagactctgtcaaaaaaaaaaaaaaaaagggtaggcacagtggctcacacctgtaatcccggcactttggaaggctgaggccggcagatcacttgaggtcaggagtttgagaccagcctggccaacacggtgaaaccccgtctctactaaaaatacaaaaattagctgggtgtggtggcacatgcctgtagtcccagctactagagaggctgaggcaggagaattgcttgagcttgggaggcggagactgcagtgagctgagatcacgccacagcactccagcctgggcgacagagagtccatctcaaaaataaatacataaataaataataaatcataaaaataacaaaattagccagtgtgatggtgcatgcctgtggtcccagctactctggaggctgaggcaggagaatcacctgaaccccaggggcggaggtggcagcgagccaagattgcgcactgcactccagcctgggtggtagagtgagagcctgtctcaaaaaagaaagaaagggaatcagtactcagagcacttaacagtcctttgcagacaggcacacattagggagaaacgggagtccctgtgctggctccccacagaggtgggacaaggcgatgctctgccctcctcttcacctcctacccagatgcccggagaggagacaggagggccaggcagtgtcacgtgtcacgcatgaggccagttctagggttagttccaggggctccaagcccagctgtggcacctgttagtggggtggctagtcaccctatatttccaacttcctttaaaataaaggaaatagaactgaccaggatgcattgctttgaggatttcctgttagtagggtggccagccaccctatatttccaacctccttttcgtttttgtaaaataaaggaagtagaactgaccggaatgcatggctttgaggatttgagatcacaatcttatacgcgtacctgcatgtgtacatatttttcccctaggggcaatggtttagtgtttgagggactttctagaacatactgcctcaaatactgtgtggatgagcccaggagccttggccagccctgcactgagtcttattccttccacagggtgggggtaccggtgggtttccagggctcggtgctggttttcctcagagagtcgggggagcctgcctagaatgggttcctctccgttttctgtgccctttgaatcaggagaaagccgggctgcaggccccagggagcagagcatcagagatcttgccagggtattgcagctccaggggaccggccatgggagaccagagacgcgacctgggctggggaggttggcgctctcgttctgagtctccagcagcggggaggaagggcctgaagtcagaagctgccgtcctacagagctggggcagctggaaggggggaagcctgtttctgcccccaagcctcccacagccagggctgcgatggcaaaagcctccctcacaccccatcaaggcctggccagctgcgaaagctgcatcgtgcctgcctgttctgggggttacacctgcaaacgagaagggtcagaacgtccagctctgggcttcatgggtcacgttctggatgatacagaagaagctgtcagactctgcttccgagtctctggacgtgagagcaaatgcacggtgtgcgcaaaggcccagctggccaggggcgtgccgtggagcctgcagcagcaggtcctcaggcagtctcgctgctctcagctggagcagggacctgcagttctcagggacttgccctgagaacgggcggcgccggccatctgcccacccagagcaccatgagaactacgccagggcgtgtggatgccagcttgccccgagaacaggtggtgccagccatccgcccacctggagcaccatgagaactacgccagggcgtgtggatgccagcttgccccgagaacgggtggtgccagccatccgcccacctggagcaccatgagaactacgccagggcgtgtggatgccagcttgccccaagaatgggcagcgccagccatccgcccacctggagcaccatgagaactacaccggggcgtgtggatgccagcttggcaagctgtgaaagccttgcaggtgtttccatcagatcccacagtgggagattctcattcgcagctcccgtctcgtggcatgcacgctgggacatcctcacctctggctctcggcagttggaagaggattccaagctaactggaattaaaatcgaacctggacccgggatctttgtgttgtttttcaggggagctgggggcagaggcaggcagtttggccatcccctgggagctgcagcattccagaaccttcagctgcctccttgccagcgcagcctcagacaggagtgcctctgaggctgtgtcggagggcgcctgggcaggaggagcccagcaacagtgtgcccagctcatcccagatcccagaggtgtgacgtgtgaactcaggacgccggccgagagcccaggttccgagttgcagtgatccccaccccaggcccacagacaacacccgagaggtcctgagagccccagggccatgtgagctcagccaagagcagaggctgccccagctccagagccgcctgatgctgccgtcgtcatgggccaggccaggcctacctggaagaggcgcgtggctgcggggcaaggagtacttcgtcctgcatgtttctctcatggtgtggggcagaaggtggcccaggaacctgctgtcgaggtgtccccgcgggacccagggacctgagctgagtctgggctgggcgccgcccccgtcccttggctcgtcctggcgccgagagttcagtgggaagccccatggtggtgcacctcgtccttgtcagggccccactgctggggtcccctctgcagctctgccacggctcctgaaggctatgtcagggctgctgcactcccctcagggaaccagacggtgccctctggaagaagcccctcgatcattttgtaagggatggatctggggtgctctcttgtcagcgctgccacaaccaggtccttctgcctgacctggccccagccattcacttcttctgggcacacaggacctttggcaccggccgtgggagcaacgccagcagcagtggctgtgtggtaggggccttccccagccacggaccccaggaagcctccatttgtgaaacaggacccctgcacctctgtgggagagggaggggtctcatccaggtttacaccaaagccttggttgccatgactggatccagccagaaggcaccctgcagtggggtctgcgcagctacattactctggcccctgggcctccttgccagatctccacagcacgtgagaagacgttggccctgcgggaagaaggcgctggggctggcggccctgtctccctgagcatgccgaggccctgacgggagcatgctccatgggggcgacagaggggcagggctatggctgggctacccctgcctccctccctggccggcggtggtactgagccgcatcaccagcgcacggaatcggtcacgcctgctgttgcggtggtggcattaagagccacctccgggctcgtgtgtcccctgcctccccaggccgagaccctggccaggaaggagagggtggggctcacgtgctgtctgccacctgcctgcaggcgtggatggcagccacagccttgtgcctctgaaggcatgagccagctaaaggaggaaggcacggcccccctcccctgtcccgagtgcttgcctttgtggggtcaggggtgctgggacaggccttggtgatgtatgctgttgctgggcagttgagctggaaggagcccgtccctgctggacacctgctctctcttctctggtgtggattctgtcctgccacaacctttggtcccttgggggacacatatttgagtcagtcccatctgctcagccaaaaccccttgattcaccatgagggcgccgtccatcctcagcgctgggcgccctccttcctgacccagatggacattttccttcacgcctggcgtggcttagtgagtgtgtgtctggaatgcagtcggtgtgagtgcaaacgccaggcagtgttctcgggccactgctgcagagtgtgtgtgtgtctgtgtggccacatgtgtgccgtcaccacgtgccatgtgtacacacgtgccaggcgctgtcttgagacattcgcgcagtgcacggcactggggacacgtggcactggctgaactgccacacagccccgttccagggcctcttgtcaaagccaagagggctcgtgtgtcgcatgtctgtccctcttgggtgcctgtgtgtggcttctgtctcatcggggtacggccgccctgcgtgtctcacatcaccacatcctggccgtccgtgtgagcgtccatgtgaccatcggtgtgagcatccgtgtgagcatgtgaccgtctgtgagtgtgcgacggtccatgtgactgtccgtgtttccgtgtgtgtccatgtgagtgagcgtccatgtgagcgtgtgagcgtccatgtgagcatccacgtgagcgttcgtgtggaacgtgtgaccgtccatgtgagcgtccgtgtgaccatccgtgtgagcatccgtgtgaccgtccgtgtgagcgtccgtgtgagagtgtgaccgtccatgtgagcgtccgtgtgaccatccgtgtgagcagccgtgtgaccgtccgtgtgagcgtccgtgtgagagtgtgaccgtccatgtgagagtccgtgtgaccatccgtgtgagcatccgtgtgaccatccgtgtgagcatccgtgtgactgtccatgtgagtgtgaccatccatgtgagcatccgtgtgaccgtccgtgtgagcgtctgtgtgcctgtccgtgtgagcatccgtgtgaccgtccatgtgagagtgtgaccgtccatgtgagcatccgtgtgaccgtccatgtgagagtgtgaccgtccatgtgagcatctgtgtgaccatccgtgtgaccgtccgtgtgagagcgtgaccgcccgtgtgagcatccatatgaccgtccatggagcatctgtgtgactgtccatgtgagcatccgtgtgaccatccgtgagcatccgtgtgaccgtctgtgtgagtgtgaccgcccatgtgagcatccgtgtgaccgtccatgtgagcatccgtgtgaccgtccatgtgagagtgtgaccgtccatgtgagcatccgtgtgagcgtgtgaccgtccgtgtgtgtgaccatccgtgtgagagtgtgaccgtccatgtgagcatccgtgtgaccgtccgtgtgtgtgaccatccatgtgagcatctgtgtgaccgtccgtgtgagcgtccgtgtgagcgtgtgaccgtccgtgtgagcatgtgtgaccatccgtgtgagcgtccgtgtaagcatccgtgtgagcgtgtgactgtccgtgtgagcgtgtgaccatccatgtgagcatccgtgtgaccgtgagcgtccgtgtgagcgtgtgaccgtgtgagcatccgtgtgagcgtgtgaccgtccgtgtgtgaccgtccgtgtgagcatccgtgtgagcgtgaccgtccgtgtgtgaccgtccgtgtaagcatccgtgtgagcgtgtgactgtccgtgtgagcgtgtgaccatccatgtgagcatccgtgtgaccgtgagcgtccgtgtgagcgtgtgaccgtccgtgtgtgaccgtccgtgtgagcatccgtgtgagcgtgtgactgtccgtgtgtgaccgtccgtgtgagcgtgtgaccatccatgtgagcatccgtgtgaccgtccgtgtgagcgtccgtgtgagcgtgtgaccgtccgtgtgagcgtgtgaccgtccgtgtgagcatccgtgtgaccgaccgtgtgagcgtccgtgtgagcgtgtgaccgtccgtgtgagcgtgtgaccatccatgtgagcatccgtgtgaccgtctgtgtgaccatccgtgtgtgaccgtccgtgtgagcgtgtgaccgtccgtgtgagcgtccgtgtgagcgtgtgaccgtccgtgtgtgaccgtccatgtgagcatccgtgagcgtgtgaccgtccgtgtgtgaccgtctgtgtgagtgaccatccatgtgagcatccgtgaccgtccatgtgagcgtgtgaccgtccgtgtgaccgtccgtgtgagcatccgtgtgagcgtgtgaccgtccgtgtgagagtgtgaccatccatgtgagcatccgtgtgaccgtccgtgtgagcgtccgtgtgagcgtgtgaccgtccgtgtgagtgtgaccatccatgtgagcatctgtgtgaccgtccgtgtgagcatgtgaccatccgtgaccgtccgtgtgagcatccgtgtgagcgtgtgaccgtccgtgtgagcgtgtgaccatccgtgagagtgtgaccatccatgtaagcatccgtgtgaccgtgtgagcgtccgtgtgagcgtgtgagcgtccgtgtgagtgtgaccatccatgtgagcatctgtgtgaccgtccgtgtgagcatccgtgtgagcgtgaccgtccgtgagtgtgtgaccgtccgtgtgagagtgtgaccatccatgtgagcatctgtgtgaccgtccgtgtgagcgtccgtgtgagtgtgtgagcgtccgtgtgagtgtgaccacccatgtgagcatctgtgtgaccgtccgtgtgagcgtccgtgtgagcgtgtgaccgtccgtgtgagtgtgtgaccattcgtgtgagagtgtgaccatccatgtgagcatctgtgtgaccgtccgtgagcatccgtgtgagcgtgtgaccgtccgtgtgtgtgaccatccatgtgagcatccgtgtgactgtccgtgtgagcgtccgtgtgagcgtgtgaccgtccgtgtgtgaccatccatgtgagcatctgtgtgaccgtccgtgtgagcatccgtgtgagcgtgaccatccgtgtgtgtgaccatccgtgtgagtgaccatccatgtgagcatccatgtgaccgtccgtgtgagcgtccgtgtgagcgtgactgtccgtgtgtgtgaccatccatgtgagcatctgtgtgaccgtccgtgtgagcatccgtgtgagcgtgtgaccgtccgtgtgtgtgaccatccatgtgagcatccgtgtgactgtccgtgtgagcgtccgtgtgagcgtgtgaccgtccgtgtgaccatccatgtgagcatctgtgtgaccgtccgtgtgagcatccgtgtgagcgtgtgaccgtccgtgtgagtgtgtgaccatccgtgtgagagtgtgaccatccatgtgagcatccatgtgaccgtccgtgtgagcgtgactgtccgtgtgtgtgaccatccatgtgagcatctgtgtgaccgtccgtgtgagcgtccgtgagcgtgtgaccgtccgtgtgtgtgaccatccgtgtgagagtgtgaccatccatttgagcatccgtgtgagcgtgtgaccgtccgtgtgagtgtgaccatccatgtgagcatctgtgtgaccgtccgtgtgagcatccgtgagcgtgtgaccgtccgtgtgtgtgaccatccgtgtgagtgtgaccatccatgtgagcatccgtgtgaccgtgtgagcgtccgtgtgagcgtgtgaccgtgtgagagagtgaccatccatgtgagcatgtgtgaccgtccgtgtgagcatccgtgtgagcgtgtgaccgtccgtgtgtgtgaccatccatgtgagcatctgtgtgactgtccgtgtgagcatccgtgtgagcgtgtgagcatccgtgtgagtgtgaccatccatgtgagcatctgtgtgaccgtccgtgtgagcatcggtgtgagcgtgtgagcgtccgtgtgagtgtgaccatccatgtgagcatgtgtgaccgtccgtgtagcatccatgtgagcgtgtgagcatccgtgtgagtgtgaccacccatgtgagcatctgtgaccgtccgtgtgagcgtccgtgtgagcgtgtgagcgtccgtgtgagtgtgaccacccatgtgagcatctgtgtgaccgtccgtgtgagcgtccgtgtgagcgtgtgagcgtccgtgtgagtgtgaccatccatgtgagcatctgtgtgaccatccgtgtagcatccatgtgtgtgagcgtccgtgtgagagtgtgaccacccatgtgagcatctgtgtgaccgtccgtgtgagcatgtgagcatccgtgtgtgtgaccatccatgtgagcatctgtgtgagcgtccgtgtgagcgtccgtgtgagcgtgtgagcgtccgtgtgagtgtgaccatccatgtgagcatctgtgtgaccgtctgtgtgagcatccgtgtgagcgtgtgaccgtccgtgtgtgtgaccatccgtgtgagtgtgaccatccatgtgagcatccgtgtgaccgtccgtgtgagcgtccgtgtgagcgtgtgaccgtccgtgagagtgtgaccatccatgtgagcatctgtgtgaccgtccgtgtgagcatccatgtgagcctgtgaccgtccgtgtgagtgtgtgaccatccgtgtgagagtgtgaccatccatgtgagcatccgtgtgagcatccgtgtgaccgtccgtgtgagcatccgtgtgaccgtccatgtgagcatccctgtgaccgtccgtgtgagcctccgtgtgaccgtccgtgtgagcttccgtgtgaccgtccgtgtgagcatgtgtgaccgttcgtgtgagtgtgtgaccgtccgtgtgagcttccgtgtgaccatccgtgtgagcatctgtgtgaccgttcgtgtgtgtgtgaccgtccgtgtgtgaccgtccgtgtgagcttccgtgtgaccgtccgtgtgagcttccgtgtgaccgtccgtgtgagcatctgtgtgaccgttcgtgtgagtgaccgtccgtgtgagcttccgtgtgaccgtccgtgtgagcatctgtgtgaccgtgtgtgtgtgaccgtccgtgtgtgaccgtccatgtgagcgtgtcaccgtccatgtgagcatccgtgtgaccatccgtgtgagcgtgtgagcatccgtgtgaccgtccgtgtgagcatccgtgtgaccgtgtgagcctgtgagcatccgtgtgaccgtccgtgtgagcatccctgtgaccgtccgtgtgagcttccgtgtgactgtccgtgtgagcatccgtgtgaccgtccgtgtgagcgtgtgaccgtccgtgtgagcatccgtgtgaccatccgtgtgagcgtgtgagcatccgtgtgaccgtccgtgtgagcatccgtgtgactgtccgtgtgagcgtgagcatccgtgtgaccgtccgtgtgagcatccctgtgaccgtccgtgtgagcgtgtgactgtccgtgtgagcttccgtgtgaccgtccgtgtgagcatctgtgtgaccgttcgtgtgagtgtgtgaccgtccgtgtgagcttccgtgtgaccgtccgtgtgagcatctgtgtgaccgttcgtgtgagtgtgtgaccgtccgtgtgagtgtccgcataaccgtgtgagcatccgtgtgatcatccgtaaccgtgtaggcgtccttgtgagcctccgtgtgagcgtgcaaccgtctgtgtgaccgtccgtgtaagcgtgtgaccgtccgtgtgagcgtgtgcacacgctgctgcccacaccctctaacacctgtctccttatcgtcacatgctgaccgtccgtgtgagcatctgtgtgaccgtccatatgagcgtgtgcgcacgctgtggcccacgccctctaacacctgtctccttgtctcgccctctgtgccatcaccacatgctgaccatccatgtggcgtgtgcgcattctgctgcccacgccttctaacgcctgtctccttgtcttgccctctgtgctgtcgctgccgtgtgctgccgtgtctgtcgctgccctgcagtcctcgtcagtcgtggaggaaaaggtaaaacccaagaggtgtgtccactgtggtgctgggggacgaccagcaggcacattagggcatcagttaccagcccagggcggctgcttggtctgctgtgaggtgtttcctgtggcagatgtgagaggtcggaagggccatctggccacattcacgagactgacactgagaaggtggcgaccactgggtcccctgcacagccatgcagctgggcagcgccgtccaggtcgcccacactctgccctcgctccacaagcactgccttggtcacagacgaaggcacggcgccgactcctgctaaggaggggtgtgcatcaggtggggctggtgctgactcggggggcgacgggccaaggaagggcccctctctgcatcagtcggacctggactcatagcccagctccctcactcaccagcctgtgtcagagccggtgacacacccatgacccccaagggcagcgtgacccccgagggtggcgtgacccctgggggtggtggtctctgaactagggagcatctgcatcccctgagggagctgcgaggacaaatcgggaggacggggtcagtcggcaaacgctcacgagcctgaggccagggcctgggggccggtggggaggagcaaaggaaagagtgaaggcagctcctgatcctgggtgatttctgtcggaggtggtggcctggctgagccgtggcccagcatggagctgtgtgggtgggagagccgtacatgcattcccttggcctcctgggagaccagaggcccctctgaccctgctgtcccctgtagcatctggtgacagccaggaccgcatcggcttcggtctagggactgagacgtgtctgatggcgtcagaactgggcctcagcagaggcgctccccgcaccagcgttgggagcgcagtggaagtggggccaggaggcccctggtgcagacagggcggttgaagcccagcctcccactggggtcatgctccctgggcctggtggctggctgccttcacggtggccagggaacctcatggctgttgtcacaacagcttgagtgccatggaccagcagccaagatggcacagcccagtcccagccggccctggttccctcgtgctacaggatacggtgttgtcctgaacataacagagcaggcggccagtccccagagctgtatgcaccccacaaagagaccccttcccagggtcattcttcatagctccccacccaggtagcggagctcctggtcagcggcggctgctgcgttcccctgtcgccgtctgcatcctccaggcatggccagagcaggttccttgaacccctgaggaagctcccttccctcctacagtctcagggctgagatgtaagcagctgaggctgtggtgcaagcagactcttaattcttgtcctgaatagccctgagcagtgtgggctccagcatctgaccacgtggcctgccccccagacctgaggaggtgaggagccagcctggcctctgggacctctgggctgttgactggaaacctcccgcggaggaggacgtaaagggagaccttgggctccatccctgctcttgcttatggcccacaggaggtcatccctagggactgagcccacagcagggggcactgagcactgtcctgacagctccagctcccaggcgctcccactgtcttgccaggctgtccgaggccaggctgtcccagggtccgtcttcaggttcggggctccctgacagcagagaggacacgtggggagggagaagacgcccctcaggctcaggctccggctgcagcagatgagacggggtcagtccttactctggatgtgtcgtgttcagatattttgcagtgaggcagcctcatgaacaggagtaatgaggatgggcaggaggggccaaggaacaaggcacaggggcaggaaggctggattccctctgctggcgccaggggaacaggcagggctggcagtaacaccacagggaggcagggctgggcacacataagacaatggtcctaaaaggcattgctcatggtggccgtgcagcgctgaccgtgatgccaagtcccgtggctggctctgctgtggggtgtctaaagcacacccggcttgtgtctgtttaaaattgaacttaggccgggcgcggtggctcacgcctgtaatcccagcactgtgggaggccgaggcaggcggatcatcaggtcaggagatcgagaccatcctggctaacacggtgaaaccccgtctctactaaaaatacaaaaaaaaattagccaggcgtgggaggctgaggcaggagaatggcgtgaacctgggaggtggaacttgcagtgagccaagttcgtgccactgcactccagcctgggtgacagagcgagactccgcctcaaaaaaaataaaataaaataaaataaaataaaattgaacttaataaaaatgagaaactgcagcatcatgggaggggaagcgccacgtaggatcataactgagtagctgctcgagctgggctgctggctggcatggagcggccccatcactcgaggtctgcttgccctgggagggcttgggaaatcttcacggccaccctctaaccatcgcttcctctcctctcgccccccatttcagcaggaaggagcgccccacctccctgaacgtgttccccctggctgacggcacggtacgtgcacagatcgggggcaagctcgtgcctgcgggggaccactggcacctgagtgacctcggccagctgcagtccagctccagctaccaggttttgtagccgtgccgtggagtgagaggctcctccctgttgctggtgttccccgttcactggggcgggagcctcgtctgcaggcagcccttcacggctctctgggccactcgccctctcccttcgtgtgtggcaggatggagaaacccagccagggtgtcaggggctcaggctgcccagcaggccctgtgtggctgtggctgttccacgcggcctcgtgtcggcacctgctagtccaggctagacctccctgcccttggatagaccgctctgtagccaggggtgtacagtgcctgtcagggttgagcttagtgatcctctctcaaaccacacccccacataaagcctcatgctcacccgggctccagccagacacatcctgcccctgagagccacgcctctactctcggaggaacgtcagtgtctagagtgtggggtttgccctccgttggcagaaaggtgaggagaaagctcctcttctctgggcccctccctgcctgtccctggtaacgcctcctgggtcctgagtttgagaaagcagagcctcgccccagcaggtactcacagccagagtgcgggggccccagcaggttctcacagccagccggtgagtgcacctcagagcacaggggcccagagccaggccactccttcagggccccaggtcgcttgctgccagttttggcctgtgagctcactggcctcagtgccaggtaaggacagccaccttcctgggaagaagaggtgaccccgggtctggtggatttcccacaggggccgtcagaggatgtccacagaggcagagcccttggggcctgtgggctgggttgggctggtggatgtggggcctgggacttctccagaagcttacttcctgctgcatgctttgccgactgtccttccacctctaagtgtccatcgtgcctgtgggggctgctgcaggctcctgctccgtcagcccacctgctgctgcgctgctctgggagcgagctccctcatggcatctggaacgctctcctgtcctccctgtgctcagggctggagagagggtggcggggctgcgggctccccgggccttctgggcccagccctgccacctgggcccacctcctctcactgtctctggctcacgcttcccgggcctggagctgggacctgcccataggcatctgaagacacgtcagcctcagccggggggagcccttgcttgacgctctctggcctccgggctgcctctcgcgcccgctctgggcccgctcttcttctcatgatgtctttcctttcacctcctgcgttgtctgacatcgtcgctctcttcataaattgtagcgttttatgttttcgttcataggagtgttttatttgatttttctttattttaaattattacatttaagttctttttattttatgctctaggttttgaagtttttctaatttcttaatttttttgttgttttttgttttgttttgtttttgtttttatgtactgtattttcagtgttttaaccaaacagttgtggctactcatggtgaggaatgaccgctaagagtttgggttctttcagtgcatttggaggtcactgctacacgttgatgtttaggaggttgagaggtttgcctttaggtaagttgtggccagggggagtgtcccatgggtaagtggtggccctgtagggtgacggagagctaggggaggcgcaatcagactgcagaattccccgcagccaccatgagggtcaggagcaggccggggacccagcgtggaggaaggtggcccagaagcgtttgtctgatgtgcacagctacaccctgcctggccacatggggttccctgttttctctctgccgggtggtggcagagtcggtgagacaccaggtgcctgtgacacattgggtagacaggttctttgagaacgtcagcacagacttcttgcatgagcggtactcgcttcctccagcgtggggagtgacatgaagagcaagggttttcctttcaaactgggcatagctgcagagccacaggccgtctcagacatttctacaaagccactccgggaggcgggctgcgcccgtgtgagggctctccctcggcactgctcatcttttggggctggacatgcatggcctgggccgctgggacgcggtgggtgtggagcagcatccctggcttccacccacgaaagccaggagcacccccttcatttgtgaccacaaaaatgtctctggactttgcaagcatcccctcggggcagtcagcccaactgagaatagctactatagaggaaggtgtgtcattttgagattccttctagagaaacttaggagcctggtagatgaagcagaaatgtgtcctctgagtgagtggccgtgtccggtactgagaggccccgtgccctgagtctggcggtgaccagagaggctgggcagaggcagaggtcagcactggccatgacttctggaagtcccgtctgccctggtcacttaaaggccagtataagtcagctgtggagagggctggataccccctcgacagctcctccctgggtgagatccttagcattagagtcccccacggtgcgccctctgagagaccacgggaacccacccagcggctgcctgggacaggcacaggagccacctgggtgcctctgaggccttgcactttcccacacctcaaggagggccgggggccacgggcaagctctgccatagcgggtgatcaggtcagctaagacgagaacgtttggggctctttttctccagctggttcagtatctttgttaggaaagaccattggaaagaatgtttgtttcgcattccgcattagtcacatagaatgcgctcctccctagcgagcttcctgaggtagacggctggttgcggtttctcgtaatccgggctgcccccaccctccagaatgtcttggtggcgtccctttctgtgagcagggattgtggtttctttgcgcttgctcatgttcaggggtgagctctggtccagtcaagccacagggtcagcaccttctggtcactccctggccctgacctgagcccggggaggaacgtggggcaggcgcgggtgggcccagcctcgagctcttcagcacagtgatggtgacggggcagcggtggcggcacagccagcccttcttgggtccccagtcagagccctctgccctacctgggctggacttgtttctgaacagccacaagctacagggggctgccgctgtgtccctggcgaggcactggcccattacaagcaatcgtctggggagggcaccagtggaaagccccgttccaagccatttcaggagggtggccctgcttccgaggagccggagtcagtggccggataagcagagccactcgggagtggtgaggcccggaagggttagcccggtgggcggcagaggagctctggcccgcagggtgtcgggcgaggcaaagtgcaaagcattggtgcgcggggcctcaggcagccacggcggagccgcaggccagggacctgcagtgactcgctctccctcctccctgtgtttggccttagtgtccacaggatgaaatgtccgagtcaggccagtcctcggcggccgccacacccagcaccacaggcaccaagtccaacacgcccacatcctccgtgccctcggccgccgtcacacccctcaacgagagcctgcagcccctgggggactatggcgtgggctccaagaacagcaagcgtgcccgggagaagcgcgacagccgcaacatggaagtacaggtcacccaggagatgcgcaacgtcagtataggtgggtgcccacctccgggactctgggctccctcgggcaggaggcagggcttggtttgggtagatgtgaaactaatgcaccaggcgggcagtgcaggcagcagagacgtgttcctcacagcccggaggctggggtccaagatcaaggcgctggcagggtaggttcctcctgcggccactccttggcttgtagacaccaccttctccctgtgtcctcaacaggcatcccctgggtgtgtctgtgtcctcatctccagctcctacaaggacatagccccattggattagagccaccacgtgacctcattttaccataatcacctcttgaaaggcccagcctccaaatacagtcatgctagggggtatctattaacatatggatttggggagacacaactaaggcagtagcctgcgtcaccccacggcacacagccccactaaccagtaacctgcatcgccccacggcacacagccccactaaccagtaacctgcatcgccccacggcacacagccccactaaccagtaacctgcatcgccccacggcacacagtcccactaaccagtagcctacgtcaccccatggcacacagccccactaaccagtaacctgcgttgccccacggcacacaggccagtgagggaaagagaagaggggaatgagggccgagaggaggtccagccactggcttgcttggacgtgggatctctggggactgggcttactgctgacactcccatgcagagaggctgctgcaacccaccccgctccaggccccgcctcagacgtctactgtgctggggttcgacctctgcccagtcagcctgggaagagctgttttctgatcatccccacctagcaggtggtccagctccagcccaccagactcaggttccgagggcagccgtgagcagggcagaggctgccagaccctctcctgaccccaggtgcccctgtgctctcccctaggcatgggcagcagtgacgagtggtctgatgttcaagacattattgactccacgccagagctggacatgtgtccagagacccgcctggaccgcacaggaagcaggtactggctcagcccaggccctggggtcctgggggctcagtatttatccaagtcggtgtctttggtgaagtcttcctctgccaccactgggagaaccatcaaggctgtggcctaccgcctccatccacgaccggcctgcagggcagtgtgggcattgaatggccacggtgggaggtgttggaagagtctgcagacgcagccactccgggctgcccactgactctgctctctctcccgacctgtggatcccaacagcccaacccagggcatcgtgaacaaagctttcggcatcaacaccgactccctgtaccatgagctgtcgacggcagggtctgaggtcatcggggatgtggacgaaggggccgacctcctaggtaagcgcaagccttcccccgcaccgctgtgcctgcacaatgctggggctttctgctgttggttttgtttgtaatgaaaggaaagtcctctgtcagctgtgagctaggaacctttttttttccagctttgttgagttgcgtttcacatggaattgtccctccatctccacaggggattggtttctggactgccccaaggatgccaaaatctgaggcttctcaagtccctgctctgaagtggtgtagtgtttgcaccctcccgtgtactctaaatcacctctaggttatgttgtagatgctgtgtaagtagttgctgttatgctgtgtcgtttagggaataatgacaggaaaaaagtgtacacgtcagtacagacacggccaccacaggcctgtacattttctgtgaggctggttgaatccacacatgcagaactcgtgggtattgagggtcgactgtatcataaaattcacccgcttcgagtgcacggtgcggtgggttacagcgtactcacaggtggggcagccacccccatgatctcagtttagaatgttccgccatccctaaaagaaatccatgcctgttagcctcgccccatcttctgcacacaccctcagggctgccaactctccaggaggttgggagggtgcccgcttctctgctctgtgcccattagcctcgccgcacaccctaggaccattgactttggaggaggttgggagggtgcccacttgcccactcctccgcagacagccctggcttcacctcagcgccacaggtctacaccggacccctgtgcctaggtctgtggcggctgcaaacatcaggacctgcttcctgtcagcacgtggagtctcctgtgctcatggcatctgctggcagctgagcactggccatgtggctctgagccccaggctttcaggcatgacaggcgggcagtaggacagcgcagtctgtccccttgcacgcgtcagggtccgagcctttcgccatggccttgcttcccccagcccgcagggtgagaagctcctggatcccaggctgcctcctggtgtactcctgagctgattgtcttatctggggcagggggacctccagggagcagagtaatgtggggtgctgagcaccagcagggcctcaccctgacagggaggcctgtctcatcctggcttgagtcagaaagtgccccagtagaggccatgtatgagtaacataatattcaccatgttaaccgagttgaagtgttcagttcagtagtgttggacacactgtacttggtggtgaaagatggaatgctccccgagatcaggacggcggtgagggcgcactttggtgctgtgaattttctgtggaacttttctcatgtgttgcaaaaatatatataaaaaatccaaaggagattaatcttcagaaaaatcctgctaaataggggtaatctcttttaatattttgctatccttccactctacataattcagataatgtttatttatttatttatttatttatttcttagacaaagtcccgctctgtcgccaggctggaatgcagtggcgccatcttggctcactgcaacctccgcctcccaggttcaagcaattctcctgtctccgcctcccaagtagctggaattagaggcacgcgccaccacgcccggctaatttttgtatttttagtgcagacggggtttcacaatatttgccaggctggtcttgaactcctgacctccggtgatccacccgcctcaggctcccaaagtactgggattacaagtgtgagccaccatgcccggccgataatgtatattttttagctattttttttattttttgaaaaaattatatatgcttataataatatttaaataatatcagcaaatgccaagaagagagtaaaaaccagagggaacctccccaccatgctataatgattttttttttttttgagacggagtcccactttgtgggccaggctggagtgcagtggtgcgatctcggctcactgcaacctctgccttcccgggttgaagcaattctcctgcctcagcctcgtgagtagctgtgattacaggcatgcaccaccatgcccaggtaatttttgtatttttagtagagatggggtttcacagtgttggtcaggctggttttgatctcctgaccttgtgatccacccgcctcggcctcccagagtgctgggattacaggcgtgagccaccactcctggccgattgttttaatgtcttggtgacacctaccagacaccatggcccatggcccacagaggtatgacacatgtgtacgcagaacacacagtgtcaggtcgcagctgcccttctcattgtgggcggtgtcatttccgtgggtggcagcactgacgggcacggccaccgtcggtccttactgcagcatcaagccgccctcctgccagtgtccccatttatagatgaagaaactgaggccgggcacagtggctcatgcccgtaatcccagcactttgggaggccgaggcgggtggattgcttgaagtcaggagtttgagaccagcctggccaacatggtgaaacccatctctactaaaaatacaaaaagaaattagctgggcctggtggcgggcacctgtaatcccagctactcgggagactgaggcagaagaattgtttgaacccaggaagcggagattgcagtgagctgagatcgcaccattgcactccagcctgggtgacagggagagggactctgtctcaaaaaaaaaactgaggtcagggagggtgagatgacggtgagagctcggacttgaacgcaggtcccacccagaacagcagccctaactctgagcaaggtctgtgctgttcagtagctctattgagatgtgatttccacactgtgtaattcattcacttacggtgtacagtccagtgggtcttagcatgctcggtgttgacagtcacatcgtcttcacccccaaaaggaaaccccgtgcccatgagcagtcgctttgtctgcccctcgtccccagccccaggcaaccacaaatccatgctctgtctctgtagatttgcctgttccagacgtttcacagcaatgggccttttctgcctggcttctttaacgttgcatcacatcttcaaggtccatcccagctgcagcgtgtcagtgcctcctggcttttcactgctgagtagtgcccgttgcatggacagaccacgttgtgctcacctgtttgccctaatgggcccctgcttggtgctttccacctttgggaggctgtgaatcgtgctccagccacactctgacccccgcccggctccaagagatgaccaggattggcagcttcctcaccaaccagggactctgtggcctgcgcatccgcccatcctgttggctgtggtaccctgtgctcaacccgtggcctttgtgctgcctcgccctgctgcacagccaccccctgcagcacccacctagagggcactggccaggagtctgctttcccacgagaccgtgaggcagtccttttctcataccacgatggaggccgagtcactgtgcgctccacgatgaggctgcaagtcactatgcgttccacgccctccgtgcactctgggctctgccaccctactctgcagggtgctggtcatctgggcatcgccgagctcaggctggcacgacaggctgctcttgggagtaacagaccttttggtgcctttccagagccttaaacgtaatgcgtataagaaaggcagggaggccaggcacagtcactcacacctgtaatcccagagctttgggaggccagggcaggaggatcacctgcgcctaggagttcaagaccagcctggtcaacatagcgagaccccatctctacaaaacattttataaaaaaattaggcaggcatggtggtgtgcacctgtaagtcccagctacttgggaagctgaagtgggaagatcacttcagcctgggagtttgaggctgcagtgagctgtgagcacaccactgcactccagcctgggtgacagagtgaggccctgtctcttaaaaaaaaaaaaaaaaagagagaaggaaaagaaaaagtcaggcagtcctgatgagtggggacctcctgctgctgcaatctgttgatggaaggtttttgaaacagaggagcctgctctctggcaaccaggatggacaaatgagctgggacctgcgcccctctgccctaatcaactcgccccatgtccagctcagctgcagaatgggcatgaactcctgaagacagcaggaaaaggagtacgcccttgtgtggctgccaagcaggggagagcctggagcctgcacagatctgggaaagagcatcatttcagaaacacgtcagctttgcacgtgacgggagggtgcttctgccaaaagtcggcaggtggagagcgacatccctccgtccagcgtctacgtgggcggccctgcacctctctcagcatttttactctgagttcctttggtgatggagaaataaaaagagcccaggtcgggcatctgttgtattccatcgaatctcagacaacaccaattttaagacttttttgtttgttcgttcgtttgtttcctatagaggtaggctgttgctgtgttgccagggctggtctcaaactcctagactcaagtgatcctcccactttggcctcccaaatcacactggaattacaggtgtgagccactgcacccagcccacataccattatttatttatttatttatttatttttgagacggagtcttgctctgttgcccaggctggagtgcagtgacacgatatcagctcactgcaagctccgcctcctgggttcacgccattctcctgcctcagcctcccgagtagctgggactacaggtgcctgccaccatgcccggctaattttttgtattttttagtagagacggggtttcaccatgttagccaggatggtctcgatctcctgacctcatgatccgcccacctcggcctcccaaagtgctgggattacaggcgtgagccaccgtgcccagccccacgtaccattattttaggaatcttcaagaaagaaaaaactgctgcaaattaaactataatgtgacagtgattgtttaagacctactgaaatttcagaaatgttaacatgaggaaaaaaatgtacgtcttagaattggtatactaggaccggccgggcacagtggctcacgcctataatcccagcactctgggaggccgaggcgggtgggtcatgaggtcaggagttcaagaccagcctggccaagatagtgaaccccatctctactaaaaatacaaaagaattaactgagtgcagtggcaggtacctgtaatcccagctacttgggagactgaggcaggagaattgcttgaacctgggaggcagaggttgcagtgagccgagatcgcaccaccgcactgcagcctgggcagtaagagcgaaactctgtctcaaaaaaaaaaaaaaattggcctaatagggagtaagggaattaatactcactgagtatgtcgctggtgctgggagctgtaccagctattaccgcactacctggtgggaatttcacagcaaatattcactaaggaacttatttttctgtttcacaaatgactaatactcagagaagttatactatgtgccttgcattgctgagcggaatctggaatccacgcagctgatctttctctccgctctgctctgcatggacgaggcagccctcaggagagattccaccgatgtagtagccagatgtagaaactgtccacaaataggccgggcacagtggttcatgcctgtcatcccagcactgtgggaggccagggtgggcggatcacaaggtcaggagttcgagaccactctggccgacgtggtgaaaccccatctctactaaaaatacaaaaattacccgggtgtggtggcgggccctgtagtcccagctactcaggaggctgagacaggagaatcacttgaacctgggaggcgggggttgcagtgaactgagatcatgccactgcactccagagcgagactccgtctcaaaaaaaaaaaaaaagaagaagaaaatatccacaaataaccttgagaaaagacaagcctgtgtaagattcagaagcaccattgaaagacataaaagaagctgtacacgcagagggtgttgccacgtgcccggacctgaagacacaccctgtgagctgtctgctgacatgacaggcagccccaccgttcccacaggaatccgttcattaccagtaaaaatacccacatgcttgttggagatttttctggaactctatgaatggatctgaagttgatccagtagaggaaacatgtgagaatatcccagaaaatgtggggagagaaaaagcttgcaggattccacataaagctgcggcagttgaggcaggcagcaacaaacctgtgatacgagctcatgagctcagggccaagagccaagacagacctggagccatggggaattcatctatgtatgacaagtatggcatctcaaaccgtggaaaacgggcagatgagtcagtaaatgtactgccttagttgctgctggtgtaaaatgaagtctaagcctgacctccccgtaaacagcagtgatttccaggtggattaaagatctaagtacacaattacgaggacaacagaatgcagccgggtgtgctggcacctgtggtcctagctacttgggcgtctgaagtgggaggatcacttgagcctgggagttcaaggatatagtgagccatgattgtgccactgcactccagcgtgggggacagagcaagaccctgtctcagaaaaataagaacgtcaacaaaggatagtagaactggaaaaggggccgggtgcggtggctcatgcctgtaatcccagcacattgggaggccaaggtgggcggatcacgaggtcaagagatcgagaccatcttggccaacatggtgaaaccccatctctactaaaaatacaaaaattacctgggcctggtgacacatgcctgtaatcccagctactcagaagactaaggcaagtgaatcgcttgaacccgagacgtggaggttgcagtgaagtgagccaagatcgcgccgttgcactccagcctggtgacagagtgagagtctttctcaaaaaaaaaaaaaaaaaaggaaaaggaagtttataggctataccaataaacatctgaaaagatgctcaatttcggaaataataaagaaataaagagaaaatcaagaaaactttttccctaaaagattgaaaataagacaatcgaggctgactagggtggagcaggtgctgccctacgtgccagccaggggtgatgggtgcagccccaccgagcactggcgggtggtaatggtggtggaccagcagctggagatgctccttcgagggagcagtcgggcagtcacagggctgaaaagtacctcaagccctcacacagggaccccaagtcttgggggagcgggtacagtgacagatgatgagatattcccatagagaaacactacagggcattgaaagcaaccaggccaggggcggtggctcatgcctgccaaggcaggtggatcatttgagctgagaagttcaagaccagcctgggcaacatggcaaaaccccgtctctaccaaatacttagctgggcatggtggtgtgcacccatggccccagctacttgggaggctgatggggaggattgcttaagcctgggaggtggatcgcgccacttcactccaacgtgggtgacagaacgagaccccatctaaaaaaagcaaccggggtcaggcacagtggctcacacccgtaatcccagcactttgggaggccaaggtgggcagattgcttgagcccaggagttgaagaccagcctgggcaacatagtgagacctcatttttactaaaacacacacacacacacacacacacacacacacacacacacacacacaaattagccgggcgtggtggcatgtacctgtagactcagctactcaggaggctgaggtgggaggatctcttgagcctgggaggtcaacgttgcagtaagctatgatagtgccactgcactccagcctgagcaacagagtgagaccccgtctcaaaaaataaataaaggcatccaggaacctcagcacaggaaagtcccataaaagtgctgagtggaacacaggaagcctcccagagagatggataatggggtcccgtttttgttctttgaaacctgttgcttatctagaaggaaacctgagaggagaatattggccgtgagcagtggttgccctgggaagccgagatgagagagaaggacatctgctctcgaattgggaattgctttattattggaattccgataacaaacagccgttttgtcatctaaatcaagtgacattttttttttaattgaggcggagtcttgctctgtcgcccaggctggagtgcagtggcgtgatctcagctcactgcaagctctgcctcccgggttcagccactctcctgcctcagccgcccgagtagctgggactacaggtgcccgctaccaggtctggctgattttttgtatttttagtagagacggggtttcaccgcattagccaggatggtctcaatctcctgaccttgtgatccgcccgcctcggcctcctaaagtgctgggattacaggcgtgagccaccacgccctgctcaagtgactttttaatgccattttcctttctgtgtgaaacaaccaagtagaagagaaccgcgtcctcacctctgttggaggaagtggtgttttcccgcagagcgtttccctcgccagcctcctgtgcagggaggggccaggacccagtgaggatgcctcgcccgccccacgctccccagccctcctctgctttctggcatgttctctctgccctccacagtggggcccttgctcccattgtgacttcagtcatccttcaccgaggtcctgccctacccaggctgacccagaagcctaggagtccagctccaggcctgcgtctgcggtgtctccctcgccgctctctccctcgcccacgctggggggcttttggagactgggtacctgccacaccctgccacacacactctcctcttcacaggcctgcatcatgggggctgcggggggcctgccctcctgatgggcgatgggagcagagggcagcaggcttccgggtcagggctcggcaacacagccctgggctggaccacggcgcctgggcctggttccctgcaggcctctgcctgggcacacggggcaccgggacctgctggaggctgctccctctctctcctgccctgcaacatgggagcagccgaatcattgctgggttttctgtaataagaatgtattgttagttccagtccctaattgacctttgtcccttccttcccctgcctctctgtgcgtcgctggactcgccaggggagttctcaggtgagtatctcactctcctgtctgtctcccctctgtgtgacggggggagtgggtggacgggggatgccccgagctatcccgtcaccgtggctgtgtggactgccccccacgtcgccgcagcgcctctgcttctgctcgcagccaccgccgctcggaagcttgttcggtttgctccaccagccacttgacaatgacctggatatccaacccccccagcctgaggagtcccccgcgggccatttctgaaggccctgcggagccctaagccacgcacggcagtgactggacatggccaaggccagctctggggcctcccctgctgtcaggcacaccccagaagtcaggggtccttgaagcccctacgaagcccagcccggggtcccctccccacgtgggtggacaggccgagtcctgctctctggctgcacagcaggaggctccgaggccccacccagaggctgtccagatgcagccccccagcctccaggcacagcccatccccacaggggtgccttctgccctcagccccacccagcccagaatttggggtgagatgttagcttcctgctccacaggtgacactggcctggcagtcttcatgtaaccccaaggataaactttccagaaggaatagctggctccatcccatctcctgccctcctaactccctcctgcacccaccctaacccagcagacccagctctgaattcctcccagcctgctgtccacacgggcttaacgcgcttctcttctctccctttctccctctcctcccgccctggttgcccatctcctgtgggacggggacggctccctagtgcgcgatgatttctttggtaaggctgaggccccgttccagcgtgcgtcgctcctccaccccgacatggtctcctgcttcatgagccgtttgctttgttctgcatgatggggacagtgttggggccgccggggtcaggggggcagccctgagtgaagctcgctctgtccaggctgcctctgggctgtgggaggtggcgacttccccaagggacagacttgaaggcccgaggagggcagccccagcctctctgaaccccacaagcgccgggcagaccctgcctgtggggaggaaggcccatgtttgaggcaagggaggtcataatagagacagcaggcaggacccctgagcccaggcacagaggcgtgtgatgctgtttcatgactgcatacacagtgggggagtgtgtgggagggcaggaccttggagtttctttccatccttttggggtttctggggcatgcttgcagggagatcagtccaggtccacttggggcctcgtggtagaggagccttcagtcctgccagggagccctgtcctcacagccgcgccccatcgccgcaccccagccctgctggccctgccgtgagggccaggcctctccttgcccacctgtcccctcaccgcagctccaacatcactcgcctagggtggtggctccgagagggcctgcctggtgacagacctgctgggggcactgagatggcagcccagcggccattcaggggcctgcgtccggccagctggcctgtgacattggtcggacatgagaaccaccccaaggcctgggagcctgctctgtgcacagactgcgggcccagcatgagccccgcccttcacggcccccgctccctgtagatcgggcgtcatccccagccaggctaccctctttggaagcgttgttgccctgaggcaggtgcggcggcatcagtgacctgttttgaagggcacaggtgaaacctccgcaccttctgtttcaggaatgggcaaagaagtggggaatctgctactggaaaactcacagcttctggaaaccaagtaagagtgcccttctcctgtgtggtggggctgaggcagccctccttgtcagggctgggagagtgagccgggccagagggcgccttggggagcacctggctccaacgccagcagctgtcctcatctctggcgggaggaacttggagcaggactctgcctggtttctttacgaagcttgtctccaggagcctctaacaagggtgctatagggtttagctaagatggggatggggtctcccattcagccaccttcctaaccaggctgtgccttctccagggcggaagtgcaggcgcccctggcaaggccccttcacgtacctgtatgccgcgcccgtggcactcccatctttctgctttttcaaagaaacgccttgaatgtggtgaagaatgacctgattgccaaggtcgaccagctgtccggggagcaggaggtgctgaggggcgagttggaggctgctaagcaggccaaagtcaagctggaaaaccgtatcaaggagctggaagaggaactgaaaaggtgagggcagggcatggaaagctggtcagagagggaccccggcctcagggctctggagtggctgcctcctccagtgcctgctctccagcctgagcggctctgtgcatagcctacctacctccagctccagctcacagccactccaccccaaccagcagagtggggccgtggtctcctcctgagcctcctacagcacacgctgggcctgtctcacgcgttccttctctgcacagctcccaccatcccactcctccagccctttgatcagccaaggtttggccacggcccccggagagctgtatgttggggctccagcccttctctgatggacagaggaggtgtgggcgctccgagaccatgcctctgcctaagaagggacccagatctgctctgggtttgccaaagccagggcccctctgctttgctccccctccgcattcccgggcagccaggatggacggctgggcttcagagcactcatgcagcagtggctcagggccacctgtccccagggaactggaagaagcgttcagggccctgaaccaaacggctgctgaaggggtccctgtggggagagcccccagccctgcacagaggcaaggacacaggttcggggcgggcactgcccgctatgtgttcccgaggcccctgggaggccctcaccctccctgcctccttccccttcccacagagtgaagtccgaggccatcatcgcccgccgtgaacccaaagaagaggcggaggatgtaagcagctatctctgtacagaatcggtacatccactcttcactcttcacatgcggggcgtccaccattcacttttcacaggcggggcggccaccgttcaccattcacacacagggtgaccaccattcaccattcacaggcagagcggccaccattcaccattcacaggcagagcggccaccattcaccattcacaggcggggcggccaccattcaccattcacaggcggggcggccaccattcaccattcacaggcagggcggccgccattcaccattcacacacagggcgaccaccattcaccattcacaggcagagcggccaccattcaccattcacaggcggggcggccaccattcaccattcacaggcggggcggccaccattcaccattcacaggcggggcggccaccattcaccattcccaggcggggcggccactgttcccacacattcacacgccgggtgaccactgttcatacgcattcacacgtggggcagccatcattcccacacattcacacgctgggcggccaccattcaccattcaccattcacacacagtatatcctactattcacactcggggcatggggatgcggggtgcctcccggggactcaccggcgcttctgtctctgtacagaatcagtatatcccacaattcacatgcagggctggggtgggcacgggcagggggcccaggcgggctcctggggactcgccggctgttctgggctgacagctctcccacccctcctgggtgacacctgaccccagcggcatcatctgccaccccactcctgagaccacatggagtcagaatcaggcccttgggcaggaccacagccctggcaggatgccgggtcccctgtcagcacccaagtcctggtgcatgccttttgtatggttcccctccccgcttgccgacacccctccacaccgcttcttgcctgaggatctgaaggaaattggcactgagatccacctatacgtgtaggcaccccaggaggaagcaggtgtcacccggcctccgagggctggctgagcctctgtgcccctccctccgcaggacaaaatccccatggcccagcgccgccgcttcacgcgggtggagatggcccgtgtgctcatggagcggaaccagtacaaggagcggctgatggagctgcaggaggctgtgcggtggactgagatgatcaggtgggagttgcggccaccccaggaggggctgcgggatcatccctgacggcaggactgcggctccctcctctgcacctccctgtcttctggggggactgaagtgcgctgggtgcttcctggcgggagccagagagtcgcaggtaagggaggcgtgagggcactagcaggttgctccctgtgccctcccctgcagagcgtcccgagagcacccatccgtccaggagaagaagaagtcgaccatctggcagttgtaagctgggggcccctgggggatgtgggcagcagctgcaggggaaggggcagggaggttccctggtcctctgcccacccctcacctccctgtgcctctggcagcttcagccgcctcttcagctcttcctccagcccccctccggccaagcgcccctatccctcggtgaacatccactacaagtcacccaccactgccggcttcagccagcgccgcaaccatgccatgtgcccgatctcggcaggcagccggcccctggaattcttccctgacgagtgagtgtcccgcagcccccacttgtggcctgcaatggggttggggaggccctgtcctgaggctcctcccctccaggccctgaagcgggactttgagggcagcctccaccttgctggccacatgccaggggccgtgacctctccctgcacactgcctgcccctccctgcagcggggagctgggctgctttggctccacggtatttggttcaggatgtcccttggcagaggctgtgcccaccaacagtcagggggctgtgctgggctccacggtggcctctgcagcaaggagccgtttcaggcgtctgtccagcagggagtcgctggtcatgcctgtgccccggcggcactccaggtcccggtctgtggaaccctcagtgactgtggcagcagagcagcctctgggtcgagcaggggccagctgtggcctccaagcccaggggcatagccggtgccaggaaagccacccttcccagctgggcacccagtgccgggaaagccacccttcccagctgggcacccggtggccgggaaaaggcgaggatgggcccaggcgggcctccctgccgtgacctcccccaggacaagcctggggcactgtgggggccgctcaccctggacagagacatcacccatcattcttccactcagcgactgcacgtcctccgcccgtcgagagcagaagcgcgagcagtaccgccaggtgcgtgagcacgtgcgtaacgacgacggccgtctgcaggcctgcggctggagcctgcccgccaagtacaagcaggtgcgggcgggcgctgcggggaccgggcggggccccgcagaggcggggcgggggtaaggggcggggcgctgtggggcggggagagggcggggcagtgctagggggtgggagaggacggcgggtggggcggggcctggcaggttcctagtgagcctcctgggcaggggtctggagggtcggagaaggagccccgcggctcccacgcccccacctgcctccagtcttgaagtggctgtgccgccagaagctggcagccctacctgtctcagatttctggagggatgggtaggagccagggttcgtgcccacggcgcctccctgctccctgcagctgagtcccaacgggggccaggaggacacgcggatgaagaacgtgccggtgccggtgtactgccgccctctggtggagaaggaccccaccatgaaggtgagcccgcgaggaccccgctcaggctggctgggcgagcgggaggctggggagtgccggtgacacccgacctcggccctgcccttgcagctgtggtgtgccgcgggcgtcaacctgagcgggtggaggcccaatgaggacgacgctgggaatggagtcaagccagcgccaggccgcgatcccctgacctgcgaccgcgaaggagacggcgagcccaagagcgcccacacgtctcccgagaagaagaaggtgagcatggccgaggccaccgggcaccctccctggcttagtctcaggacagctcagctgcagagcatgctgggagtgagacacaggacagctggggacagcacccggaagcagggcagcgcaggggctcctagactgcgggaagcagtgtcttccctcaccaggactgagccgccttctgggttttcagttttcaccccccaggtggcctggagtgggcctgcactgggctgcaggggtcaggcaggcagcaggcacagaggagcccaggagcggcagagcttgcctcccagtggtgggaggcttagttttatgcccagcttgggcctcttggagctcaggggcctcttctgtggaggcgaaaccgtgtctgtgagtgctttagagtgcagtcctgagtccgcattgttctggtcctgggggaggacagccatgtcccctcaagctgtagtcaaggctggatcctgacagattctgggagccccatggccctgtgctgccaccgggtagcctcaagctcgggctctgaccttgatcccgtgccctgaaacaggccaaggagctccctgaaatggacgccacctccagccgggtgtggatcctgaccagcaccctgaccaccagcaaggtggtgatcatcgacgccaaccagccgggcacggtggtggaccagttcaccgtctgcaacgcgcacgtgctgtgcatctccagcatccccggtgagcagctggagtgggcgtttccactcgggcgccactcccttttactagcaagctaagtaaaagccctgccacacagcagctgccttctcggggtgtcctgtggacacgggaatgtggcagtggacggtgggaggggcagcacccagtcaagtgaggccctgggccctgtttctgggaggaagctcgcggcagcctcggcctcttctccctacctactcaggaccccacgcttacctggttagagggtgacgggtgggcacggcctgcagcttgaagcatcactcggagaccacaggaaaacatttcctcatgctgaatgtgaaacctccagttgggccgaaggggctatgggggtgtgggtgaggagcttcgtgtcacccctgtgggcagtagccttggtgatgttctgggccagccccaacactgggaggacgaaggggtgccgagggctctgccaggtctctggtgtgaaaccacagggccgtctggggtcctgagggtctgccacaggatcacaggttgtttgctcccagaaccagagtcttactactcagctccccttggcccaggggcctacccaacagagcaggcttgctggagtcccagacctccaggcagagggtcgtgggtgggctgtgggtggagcatgtgtggaagctgggtctgctgggaaagtggaaggccagccccggcttcctctgcccctgtgtaagtgctgggcacgcccttgcagtagtgggttcccccgcacaggctgacgggccgtccctctccccagcggccagcgacagcgactaccctcccggggagatgttcctggacagcgacgtgaacccagaggacccgggcgcagatggcgtgctggccggtatcaccctggtgggctgtgccacccgctgcaacgtgccgcggagcaactgctcctcccgaggggacaccccagtgctagacaaggggcagggtgagtcctgggcgagtttcccccatcccctcattcccacgtttctgcccagcccaagctcacctctcctaacacaggggaggtggccaccatcgccaacgggaaggtcaacccgtcccagtccacagaggaggccacagaggccacggaggtgccagaccctgggcccagcgagccagagacagccacattgcggcccgggcctctcacagagcacgtcttcactgacccagccccgaccccgtcctctggcccccagcctggcaggtgagctcttgggctggggcaggagcagagggaaggcttgcagaggtgggaagggcctcggggtcttggggcaggtgcgtgctccgtggccccccctggagccaccgttcttcctgcagcgagaacgggccagagcctgacagcagcagcacacggccagagccagagcccagcggggaccccacgggagcaggcagcagtgctgcacccaccatgtggctgggagcccagaacggctggtaggaagggcccggggcaaggtggagggagggtcctgggtgagcccctcgcccatcgccgcttccttccctaggctctatgtgcactcggctgtggccaactggaagaagtgcctgcactccatcaagctgaaggattctgtgctgagcctggtgtgggtgaccccagaccgagggccgggcggcgcgggggaacggggcggagggggctggcacagcctggcccaaaccaggctcaccgcattcctgtttcaggcatgtcaaaggccgtgtgctggtggctctggcggacgggaccctggccatcttccaccgtggtgaaggtggggcctggcagcacggggtgtgtgggtggcagctgatggccctggcattgtttagccaaggggctcccggggttccaggcctctccttagtctggcagtgggtgtctcaacccgatgccctgagcagaggtggggcctggccaggcctgagcaggtgtccggggctccctccagatggccagtgggatctgagcaactatcacctaatggacctgggccacccgcaccactccatccgctgcatggctgttgtgtacgaccgcgtgtggtgtggctacaagaacaaggtgcacgtcatccagcccaagaccatgcagatagaggcgagtgccggccagggccccggggaggggaagaggctcctgctggccagcagctctcccgcatcttccatacggaagtccacgaggccctacgtgggtcccatctcccctgtaccacctatgactcaggctcgaacaggcgcaaagcaggcgctggctgggaggtctgaggggactgcaggtggccctggagctgtggcaggtttggggctccccacttcctctcctctccccagccctgttgatgggcagccatgactccacagaagtcatttgacgcccacccgcggcgggagagccaggtgcggcagctggcgtggatcggcgatggcgtatgggtgtccatccgcctggactccaccctgaggctctaccatgcacacacgcaccagcatctacaggacgtggacattgagccctacgtcagcaagatgctaggtgaggggccacgccagatggggtggtggggtgctcaaggccagccaccctgaccgctctcccccacaggcactggcaagctgggtttctccttcgtacgcatcacggccctgcttgtcgcgggcagccggctctgggtgggcaccggcaacggagtggtcatctccatccccctgacagagagtgagtggcctgcacacctgcaggggcagtggtgctgccagaggtgtacgtgggttcacggggtggctctgcagggccaccttggagggtgccttgctgcccctacgctgaccgctctcctcttctcccatgctcctcccatgtccccagctgtggtcctgcaccgaggccagctcctggggctccgaggtaagcccagccacctcgtgtcccctcacgggagcctctcccactctccacctgtatgcgggctcagcgcctctgggttctctccctgcagccaataagacatcccccacctctggggagggcgcccgtcccgggggcatcatccacgtgtatggcgatgacagcagtgacagggcggccagcagcttcatcccctactgctccatggcccaggcccagctatgcttccatgggcaccgcgatgccgtgaagttctttgtctcggtgccaggtgaggctgggcccctcctgccatccacatcccctgcatgccagtggccgccgcctcccccaggaggccgctgtcctgaatcgcttctgccatcccagggaacgtgctggccaccctgaatgggagtgtgctggacagcccagccgagggccctgggccagctgcccctgcctcggaggtcgagggccagaagctgcggaacgtgctggtgctgagcggcggggagggctacatcgacttccgcattggtgagcggggcccagggacagggctgaggttgggcgcggggggagcctggccgtcactctgctgctttgcccgcaggagacggagaggacgacgagacggaggagggcgcaggggacatgagccaggtgaagcccgtgctgtccaaggcagagcgcagtcacatcatcgtgtggcaggtgtcctacacccccgagtgaagctgctgccctgcctggcccgacctgtacataggacccccgaccacctgacccccgcccggcccgcggggtagccagccaggcgccgccgcccctcttctaacctctcaacctgcagctttcacctgagtctggcccctccagcgggcagggagtgcggggatgcggatcagctgggaggaggaggggaggggaacttccacccgaggggaagatgctctcgggacagtttcccgggcagctcctggccagcttccagcccagagtcctcaagtccagggcaccttgggcccagcgcaggcagaatccgaggtggtcctggctctaccctgggcctcctactccccagcacccctggaggaggcaggggctccccgccgccgaggctgcctgccctgggcccacctctgcatgctgctcatggggccaccctgcctcctgggccctcactctgcctaggggagctgggccaggcactagcctttgcccagggaggtgggcctcaggctgcccaggtgcctgcaccccagccggccttctctggggcctccccgtcgtcaagcctctatcctgtctgtccccaccccagctgtcccctgcccagggagctggcataaaagcacgaggcccggctccctggggcagctgcttgagaacagagactgctaccccatcctgcccatgcaggcaggctcttgccagccccgttctgacccgtgtccccccaggctctgcctgggcagaagactcaccttggaggagtgggccctggagtcctgtccctcccagaagcccccagggtgggatttctcaggctgccagggcaggcccaggcctcaggaagaaggggaggcccctggcctctccgggatcagtcctaggacacaggctcagcctcaggttgatgggggatgatgtgctcccggggcctgcctcctgcacggggctccacggagcccagctcccagacacgctactaagtgcctagggttgcccgctgtggcctgcttccagggagcaacagagaggccaccaagcagaggcccgtggggctgaggatggagccgcccccagccgactccaagcccgcagagggcagacgccaccctggactgctctccctgcccagctgggcctctctggcctattcctaccttccaggcccactgcactcctgtctgggaggcccttatgagggcagcccagcccccgcacccacccccaaccagagaagcacagatcttggggagctgccccacaagccccgctggccaccgagggctgcagccgctgcgctgccggcttctccccaccaccctgccacctccactgtgatgtatgtccgctccctcgtctgttcccccaggatctcgaagtgactccgggctgagcagtggggcggctgggggaggggtgacgattctcctcaggctttggccctgcaagcaaacccacatatctgctctgtatgtaataaatgtcttaacgtcgtagctgcctgttcctgggcccaaatcgaaacgaaaacgaggactttattataaaaaaacgttggaccacgttgggctgggcaccaggacagtgtcctggcacgtttccaggcgagccgcgcaggctcctggagcagctcctcgggcaggaaaccctgtacgccagggattggagaggcctgcgccaccctccatgcaacgtccagacaggtggatgttcagcagcccgtccaaagggatgctccaagcgctgtggggtggggccagaagcccgcccacctgggccctggaggaggctggagtgtgagagcctctgtgacgcgcatctgccgggctactcatacagccagtgcccagcgctgtcctcccagcagaggagctcgtctgcgcggaaccagagagcgatctcgcggcgggcactctccaccgagtcgctgccgtgaatcaggttcctgcgcggaagaggcgcgtgtgagcgtgggaaagagacctccggcacgggtaccacgcaggctgaacagggggaggccggacggggctgggaccgtccccggggcgggccttacttgccaacctcgatgcagaaatccccgcggatggtgccgggcggggcgtcggccgggttcgtggctccgatgagcgcccgcgaggtgcgcaccacgtccagcccctgccatacctgtgcggaggaacgggcgcggtatcacgcgggggtgggggtcccggagccgcccgcccgcttcccggatactcaccatggccaccaccggcccggaggccatatacttgacaaggcggccgtagaacgggcgttcacgcagctcggcgtagtgctcacgcagcagctcctcggaggcctgcggaagggtcaggccgcctgcgcccgcacccggcacctaggcgtccccaggtccccgctccccttccccccacaccgcgcccccgctcgctcaccgcgcccccacctgcaccagcttcagcgccaccaacttgaagcccttcctctcgaagcgccgcacaatctcgcccaccagccgccgctgcacgccgtccggcttcacggccaggaaggtgcgttcgtgtgcgccggtgcaggctgcggggcaggcggggacgggccgtcaggccggcccagcaccggccacccgcccccggcccgcgccgcgcggctcacccgcggggaagaggttagcgaagatggtcagcaccaggcagatcatgatggcggtgcgggagcgggatccgcggggcggggcggtggcgcccggggcggggcctgcgcttaaagaggcctggtcggggcgctgcggcctccgcggggaggctgcttcacttgcaccccggaacccggcagccgtggggggccggagggcagctgcggaggccaagtctcctccagcagctcggacactaactgtatcccccacaacccgcccaggtggttccacccacgcggcgccctgctccgcaccgcccgaaccccgccccccccgcgcccccccg

SEQ ID NO: 356 - DNA, 156985 bp, Homo sapiens
  source 1..156985: mol_type = genomic DNA
accctcacggcccctctagcctctactgactgtggtcctgacagcctgcgcaggccatggggaaggtcctgacaggctgcgcgggtggtggggaagggcatctgcgtccatgaggctggggctccagcagcccctcctcttggctctcagcctggtaagttaatttccagtcaccttcaggagaaagtaggcgggcctcttcaggcaagcgttcagtgagcacacaagctccctggctcagttcctatcttgctgtgttttattttaaaatactcacccaagtattgtactgtcatggtgaatgctagcttatgatgtacccttggtttgccttttaatgcattttccacatatgttacatttagacttgccaatgaaaagaatacaatttttaaaatgtaattatctttgcatgattttccaaattcctcagttggaaggggtctgggcagagaagtgtagccagtgaacgtgggctttctgtctgccacgcctgccaggcgagctcaggtggccatgcctccagcctcggcagtttttcctgctattgcaatgaatgcaatcatattctcaagcttctcaccctgcttatcatgctggagtctgaggctctctgacccccgggaaacaggagcatgtaatcctaccctcattcagcatggaagttccccttcataaaggtcacagatgcaaagcatttctcacagctgctgctgagacacggaggggaactggtgattccattaaaagcaaaacaaaggctgggtgcggtggctcacgcctgtaatcctagcacgttgggaggctgaggtgggcagatctgcttgaggtcaggatgggaccagcctgggcaacatggcgagatcccgtctctacaaaaaatacaaaaattttagctgggtgtggtggcgtgtacctgtagtcccagctatgtggaaggctttggcaggaggatagcttgagcctgggaggttaaggctgcagtgagccaagattgcagcactgcactccaacctgggtggcaaagtaagatcctgtctcaaaagaaaaagaaaaaacaaaagagactttcgtctatctttttgaagaaaaattcttgtaaccaaaggtaactataagtaaaacattgcttcacgctctttcatgctttcagagaaaaaggtggcaaggggaacacgtccaagactcctgggttcacatctgcagggtgtgtacactagccacacagcagaacacagacagacttggaagcttgtcttcagagacactaaatatttttttcctggtgagagaatcagtgccctaacaactacctctgttccactttcttcagtagccatcgaccctctgatgaggatgccccctccaacaggcaccgccaggcagccctgcctggagacccagaggcaccgagtcacatttgctctgcacacctggctctcgcttgatgtgggcctgtgtgctacagcccggaacacaaaagaagacacccatgcaaataccattaaaagtttattgttttatttcaatattcaggaacagtgtacactttccgttcagccatcgtcacagcacgtgctgtgtgggtgcggccacgtatggatcgcagagccgacctcagctcagcgacgcagagtgcttctgctgaaaaatttggaggtttgtgtctggagttttgttctttgtaactctctcatcatcgaggctatatattaatagacatggtattaagcccacacgaaacattcagaattagaattggattaagaagacgcgttttggcatcacgctgactactcctcatctccgtcctcggggagggtgatgccagcgtgggactctttggaaggcctatcaatcacaggtgcgctaaaatcaaaaggtgggtcagtaggttagggagggaggcgcgaaaggagatgccagcgggtgttaagaaggatatggtcagaagagctctttgtctccatccacggggccgtctgctcagcccgtgtgtctcggtgagtaattcgggagcaggtgcacgcctgtgcctactcgctaccacgcgtcttctgggaggaagtgaatgagccggttatcttctcagggagggttagtgctggccactgtgcactgccgctgccagcacgcccggtcacagccagtgtctatgggcgactggcgcggctgcgaggctgtctagaggactcctacccttctgctctgagtgcgcaagtcttcctggactctccggctgtgggctgtggtttggaaacgaggttgttcatagaggctgctctggggccaccatgcagggcaacggtgacgtccagaggccacctgcttgacatctccatcaccaaatctccaggaagaccctgtttcctatgtgaggccattgcccagcccacgtttgcctccttttcctccctctgccacacgcgaattcagctaattggggtgtgtgggcagccacggcctggggaggtggccccctctctgtgctgccccacgttggactctaacagctgcccagcccgcatgtcacataccaaaagctcccacatgtagtaagccactccttgactgtctaatcctgttaggaaaaatgaagtctactttaggaggtgagagaaggacaggaaaaaaaaacaaaggaagcttggatgtcaacagtcctctctgccgcccacgtcctctctgtctctgcagctgtgtgcctccatggcagtgaccagcaaaagcgcaagggtgccgcagccacggcgaaaagaaagtccaagggtggaggggtgaacgtggagggacgtctgtgcacctggccccctgaagacccacgtgcgtctgggggcacattgcgggggaaggaacgtgatcttcacacagaaagggacagttttaaccgttttctgttttcatgttctcatttaactgttggccggaaattgccggtaggctgccgtggcctgaccctactacgtgcacaactccgcaggcattaggggaggggtcatctgctctaattaggtaacaggggcaagtgggattaaagttttaaggcagttatattaagaagctgaggacaggattccggaaccaggtgggttttcagcgtctagccatgggtgatccagagcgactatctcttcctccctgaaaaggaagagagaggagttaggacgagagtgccgcagggtcctcccacaccagcatcccctcttctgtggtcccgggtggatgctgagccattgggtgtctctctcatctgctaatagaaatggcaccccggagagctggtcttttcattccatttctcccgacctccctcagcaaatgctaattgaatttccagttctgtgagagagaactggaatcggattcccaggccccagggagtggtgcctggcataaccactgctctgcaaaacaacgctgcacttctgtgggtgaaagtgcagccgctccattgctttgctttgaatgagcactttttctcgtcagctagaggtgccagggcagccgaggggaactgccagcgacaacaggagcaacttctttttcggcgggaccctagcacaccccttgctacacgcgccagcaaagagcaaagccacgtgtccatccctggggacgtccctcctatgtgccatctcatctgccacaccagacaaatcaaatgcacagagagctttgtctgcaaactttgacttgaaggggtcttaaaaccatgcatttacacgtttgggggacaaataatttcgatgtttaaaagagagttggcagctaattgagatggtgcacaggtgtgctgtggcccacggtgtggaggtagccaggcgtggccatccctctagaaagaggaatgcgttggtcactcagaatgtcacttagatcgacgaagcagaactgcactttttttgcattcaaatttttattcaaagtttagtctctctccttgggtttcccctcttttatgaaatgatcaattttggcgaagagcccccagaaagcaagatagaaaagaaatatgctctttaccgtggccgatcagcaacgaaccaacactgtcctcatctaattctacgtcttccacactgcccagtaacacaaataaccagagcgcagacgccaagaatccttccaagtaacgcagctaacagaccaaggtgacagttctgacttcttggggggttttccaagtacatacgtagcattataaacaagcctctatgttgtgcttacacaactcactcaagggatttttgttttcacaagtgaaaacgtttatgaaatgctagcctgcgaagccgcttcaggaaccatctagtgagatttccctcccaagacaggcagctttctcacataccgtggaggcctcctgccggcctggggactgacaggtgcagggccctgcccctcgagggccagcctctccctcgggagcgtgggtttttcctgtttgatcctggcttaacttgaacatctctggcattggagctgccctctggagtagcccagaagttggcactcacctcaccttttgctgcatttccaagagatcagcctttggacttcctggaaagtggtagaaccactgtcctatgaaacaaagtgcttctgtgctgaaatggagtaagttccctgcagcctctggcaaggtaacctaccgaggtacaatcttaactttcttgatgcccccttttgacattgaaaatggtgggtgtattggttttactttttatcattgaaactacaatttgttgagcactgaccatgcaggaaacccgtttttccccgttttctcttttgtgctcacagcacctcctggagtaggtgttcctatcatcctctctttatagctcaggagccaaagctcagccagcccgaaggagccaggattagagcctgcatggatgcaacagtcacgcttctctctattacgtgtcttgcaacttggagtcacatgatctcagcatctgatccaccctgggctcaggtcagtataaggctgaactcacaaggtgagggttagactgacctcctctctcaggacaggaaaagaacagagcctactgcaaaaggcagatactcttgcctccactttgacatctcacaactccacagcaacactacaggtgggaaaacattcacatgtatgttcgtggaaactaatgcacatggaaacaggatgctcctatgatgttctgatgtagtttccgagtgatggggggacatgcatagttttttctacccagttcctaccgacagcgctagacttccagatttgagtgttttcctctcactactgatttccaacagcaccaaaaagaacaggaaggaaagatggtaaaatgatgttaaatgctatgaagtccctgtcctctccatctgcctgcctctagaccccctcatttctgggggagctgatttattaatctattggaagtgctccaagtcaactaattcagccatatggccatagtaggccagttatgaactttttatgcagtaaaatttaattacaaccatatgatttgaaatttgctttgatacatagaagcttcccttgaactctacagaaattaaataatttttaaaagcttcttacaaaaaagttcagggaaaatactgaacttatttcaggaaacacatgtgtatagtacactggttatatttgcacacagtaaatgtgcagatctaaatgcagctttctgttcctcagggtggtcttggtaagctctggccttgcaagcatctttgagtgactggttgtaagccttgcatatattgcaaggacaatatttgctaaatggggcccctcactcatctgggccctcccatcaactctgagccagcactcagctctcccggtgtgtctaacagtccttaagctggtagtggagtaattagttttccagatgggatgaatccgtgtttcccaggtgagcacggtgtctgcaaaatcatcacaactagcaacacctagttcgcccttggacattctgactcagtgaggctgtggcggagcgcagataggggtctgggcgtgcatcccaggcgattcagaggcaggtgacgtgctggccaggtggggcggggccgtcctgactgcagtgctgggttcagacactgctccccggggagcctcatctccgccctcttgtggccacatcccagaactgcggcaatgtacagcatgatggccctgagacttgaatatttggagaatttttttcttaactcagaatttacgttgaggagtggatcctgcctaccacttcatctgacataaagctgcttacttagcagctcagttactccctgctcacttcacatattaaaagcttctcctaagaccggctatccttaagagcaggggctgtgccctgaattgcctgttgtccacagaacctcccagaacctcccagaatcgaggctcacggcagaggttctgcactcaccaaggacgcggggggaccatgtctgtgctcatgtggatccccgctgctgggcagagcacaccacacatccagactcaacaaaatacatggagtcaaaggtcaggtgactgaatcaatgagtatgttacacaccaagaaagacccctcctctctgcaccccggggagcagccccagaagcctggtctcctccaggatgaaaatgcaaacgcaggtgcctgggggctcccagagcctttggcttcacggttccctcccggccctgcctggagcttcatgtgcctccccttttgcttaatgagagccgctgtctaagagttaagggttttctgggtgacgtttaacaataataaaggtgactgcttatctaaggaatccgagccgcgcacctgccagccgcgttttgtgtttgtcactaccttttactttcacagcgattttgtgagctgagtgggcgggttacctccattttacagatgagaaaaccaagtctcagagacagagcttataaacagcgggcctggcattcgtcctgggtctggttccaggtcctcatgagccgacgggacactccccactccctggaggtctcctgggcattccctcccgtggctccagggatctccccccgacacccacgtctgcttgactcctgctttagctccctgagggccccaacccctgggcatgagcaagttggactccagctgggccctgccccagagtcaaggtcagtcgcctgctccagggcccctgaaccagcccaggcgcagcccttcctcaagcacctccggcttcacatgcatctcggaggaaatccacgcgtaaatgcgggtgggcaatgccacctgagcccctgcacgcctgctgggacagagcacgtccagggtacagtgcggctgagccagaggcggcagccacccttgtactcagcttagttggggattctgggagcccttagtccccgctcagtggagctgagcagagggtaccttaccagcttaaaaattttggaaagcgtgccctgggcatcgactcccttgaatcccttgtgagccgatttatagtcggacgctctgcctccgtagccaaatcctggtctctggccttcggccccctgcaagagaagaccacggagctcaacctccacccgcggtgctgggcacgctgcttgagccactgggagctgccaccagggccccggggaagggcccaggccccggactggactggtgagtggttcaggagccacgggccagcaccacgctgagggggtgggggcgggagaggctgctcccccaggtctaccagggtgttggccgcagagagaggagggctctggtttgggcggaggctctctcatgagatatgcggcccaaccacacatattttaaggatctaagtcgtttagggaacagttgcttaccttcacgctgtggggtgttcaagagaagattagcaaacatcaagcaaatcaaggtaaggaggctcctgcctacacgggtttggaggactcggaccctggggggctgtgcgctgtgtaggtgccggtccccggaggccccggcctgcgcctttgctgggggctccttttgctgattgatttgcacagattggattctggtcacatgtgccctgtggttctaggatctgtctgggagatcaagagtcctcggccttagtaaaatgtcgagcctcgtatcttttataaggttttgagacaaaatcctgagctctctcccagggtgagcaggaatcagtctcccttggccatagctcggactgggagcaacaggaggccggggctgctgagccggacagagggaggaggcaggcctggctggcacggggggcggccgcatcctggcagcagcgggacagcgtctcagctcccccacctcccagtcccctagcacctttctagctcatccggctgtgtggccttgggcaagggcaggaacctctctgagcttcagtttcctcatctacgcaatggggctgtgcgagaacacaagccgttcatggagatgccactcctcaggtggaggctgccagctctgggctttggtgccagctgtcatttatggaagagcaggccgccctgccctggcctcatcagccccagcagcccctctggcttcctcatgggccgtgtgaccgcaggggcttcctgacacacatgggtgcgagtgtcccaggaccagcctctacttgctactgtgctgtcttctcgagtgggaactccactgcaaacatggggaggaagggaaggagctcgctgtgggagtctgggcgcggtggacgttaacaatggggggcgaagtgtcctcccacggtgggtgcactgtctgtgggaaggctgaccacgctgttagcttttcagggatcttggttggcctcctgagtctctactcaatggacagggtccagactgcactttacattttgccaacaagaaatgggagactgtccttgagccctctcctgaagacttgagggaaccaaaccagactgtccctcctctatcagcctgcagcctttcttccatttcattaaagtgttttaggacagggaggaccttgaccaacctagcccatctcttatttagaggtgaggaagatgacaccagaggcctcaaggcttccagagcacctggctgcaccctcagcctctgctgggggcttcccaccatacaagctacttgcacagttttcttttcattcagcctgtgcttgggagtgagcatggccactcagaaccaggcagctgctttcgtgtgaacagttgattcgggggctatccagtgaggtgagggacgggatgtgtggcaagaaggtctaagcactgcacacgaggggacagccagcctcgctcttgcgtcctagaggtttccaggttcatgctcactccctgatggcagagggcaggttgccagcctggctctacatggcagaaagccacttccctgcaagcgttaagtccttctgtcttactctattgcttttctccaaaaataaagcatttttgagagctaaatccggggattgactttcagattaacaatctgcgcggcctttcctcctttccaatccttagtcatgtttatctttggggaacctagaatgtaccaggaaacacacaacacagcttagaaagagaaagtgggggctctctggaactccagacaaggagagagtcctgcggctctgggaaacagacaagcagacaaaatgcagagaaggattttgctttggaaaaaagagaaattcaacagacattagtaggacccaaaagggagagatgcagggaggaatgcaagggtctttcttgttagctgctggggcagaacggcctgtgtgcaaccccccatcgctccacattcagggaggatccggcacgacggccccaaagtccactcctagaaaattaagagcagataaagcagtagctaaaataagatttctgggtcaaaaatgaatttcattcttctatcatctttgtctcctgctggcatagaaaataaaaaattaattgtgagtactagtccatgtacatttgctacatgattgtcatcgttttgcaaattcattaggtcagaaaaagcaagtcaaatatgcattaatggaaaacgtttcggtaaatatcttagttcataattcagtgtaatcatgtgtgggactgatctgggatcctcatggtctctcaagtaccctgccccttcctccctctcttccttcctcttccccaccttctgttttctttccctgttctttcttcctgttctttctccttgttgtttttcttttaaaatgtattcattcatttatatgatgcttattaattgagcagaaagtgtaggtaggctctgttctagcgtatgagagcattgcagtttcggagacagacacaacctatctacaatacgttggtggttattcctccattttattctaaaattataacttttatacagtaagaatcatatctggtatttgctagtaactaaagtctgtaagtttggttagaatataatgattggcattttaatttggctcagacaccaaattttttcactagaaagttcaaattggccattttaaaccttccttgaaagtttgctttcagtattaaccagcctaaaattcctaaggaagattttctggatggcttgatatctatgttttaattattatttaaacacatacaaaacaaaaatctttggattaatgaggttattataaatcgagcaactctatttagcctctttttctgttcatcagcagaatcattttcccagtgtcagcatctggggtcactgagacgggccagccagtcccacttccacatgcgggttcctggggcttctcgcactggttgtgttggaggaagttaaacattttctcggacgtggtgttgctccctccctgggagggagaccagtcacgtcgcctgggaaccctctgggagaagaggatctggccttgcagggctgggtccccggcacagaagcaagagaccagaccttccggaagggaagaccacgtttcatttccccagtggaagacaaggcggcccgatcccagctgtgggcagagaggtctcgagaggagagaaaaggaggccaggaagcaaccgaaacagagcagaacacaaaagttgcggggctgtgaggactgggacggaagaggaagccgatggaagtgcgttcgtcacctacccagctaaatctgctcagggacagtcctctcccctgcatgaggaagacagagaaataatgacatggtggtcagtgaagggaaagtcctttcaatcaacaggaaacacagtcaaagcacagtggagctgaggtggtaaaaacaggttccacccggagctccgaggggggccgcaggctcagggccacagcggctgtgcaggtgcgggagggacaggaggggtgcatggatctgccgacctgttctacttgggagctgcctggcaacacgttttgggatggattctggtagctcggagcctaactctctctttggtacattatgggattttagagaaggtctatcagaaaagtgatgatcaatcaaaacattccaaggtcttacctttccctgcgacgggggtggtgtgcgaggcgtcacctggaaagacacagagaaccgtgggctgcactgggagccctgtgccgccgtccatttcctaacgggctcctgcctgctgagggtggctagcatccatcagctgccagaagcacccgggtgcccagcctccccacttctgtcctagttggtgaagaagtatagacctgagattgaaaatattctagatgatgcagatctcccagagcactcaggaagtgtttcagaggatggaaaacacctcccagaggctccgtagctggggaatgggcccatcttgggacactgagggaggcggcggactttgcttcaccgtgagccctttccggggctaggagtagcgggccctctgacattcagagcttccaaggggatgtccccaggtctgcagctcctaagtgcacttatcgaatacgagcataaaatgtctgctgcactgagatcttggaattagaagcctgtggttttgttcttgtttttaatcgtcttcgttttgcatggcacttttcggtttacagaaaaactgtgcagaaattagtttccacataccccgaacagtttcccttattagcaacactgccttagggctctctcggtgctgtgcacgctgtgggtttggacaagtgcgtggtcttcagtcaccatggcagcctcgacagagcggtttcgctgcccgaaaaatgccctaaaaatgccctgtgctctctctgctgccccctccgctcccagcccatggcaagcactctccataggttgcaaagcctgtgtttttaggctaagcgttacatgggagcctaatctcaagagaagtgagctctctggagaacgcacggagcgcacggtgcaatccgtggcagatacagtcgggaagcgcttgcctggaactcgcgatcaggtgcgaggggggagttccccggccggcctcaccctgatgatgaccccggtgccacccccgagcgtacgaacgtcctgtgtggatgacagcagtggccagcacccctcctccccctcacagttgctacctcttcccatcgatcgtcacttacaatgttcttgaagaagtggactacggggttttcatcttgggtccggccgtgtgacttctggggcagggagccgtagtgagcagttcttgccgggtggtgtgagtcctgaaacacagaggcgcggtgacctcaggacaagtccacagtccctgcggcttgtcctcctcagggaagctggatctctcctcctttgtaatctggattttttttttttttaacagtcaggaatactttattaaggactattgtgatagatggtatctagactatcacaatggggagagagatgggcttcaactccacgaacagtaagaacaagtggagatttgtagcaaagcagcaggtgaggatggggttgggaggtgaagagttagaggggtaggaaggtgggatggtgtgcattgctcggtgggtggaaaattactaagaagagacataaagggtagggaggattcttgctaaactggcctaatatgattcttgcagaaggcaggccaagatgatcctatatcactcaggggatggtgagggatgagggatttgatcagatttggagggtgatcatatatcaagattgggaagatcctgtctaaactagcttagcaggattcttggtaaaactggactaggcaggcttgaggacaaggcccatggaggaggcttagttgaaaagagggcttagaagagcctgtctaaagttcagtcaaggagagtgtctttgtcaccttttaaactttgtctatgcaaattagggtgtgtgtgtgcttgtttgtgtgtgcgtgtaggatggtaggttgacaggtgtacaactagtgatctggattttttaagggcttctactaggaagccacagatgagccaccagacacacctggggcagctacgggctggcagcagcgggtttgggtgtgcgacttgctggggagagatttctatcaccgactcagtgtgcggctctcctgaaggtgaacaagcaaatagaggggaagtgacggtaattcaagggggattccatctgagatagggtcaggttgggcaaagcactgagagaaaaatattacttatccccaggcttctgggctgaatacaggaaaatgctcgggaaatacacacagaaaaacacacaacagcatgaggcaggcagctcatgggctttgacgcggctgcataacatgagctggtctctgcttctcaaagtaagtgtctcacgccacactgacaccgggctgatttgggaatatcacttccacatctcgagtaagaggaagcggagagggaagaatggctgggcatgagtgcccagggccagctggtaatcaacagaaccagaacactccaggtcactagagatcgcacagaagatacagagtggtaagcactgcgagaggttagctcacagtggagggaagggaaaagccatgagcgcccgggggcaggggaacacaggggacatgggggcaggtgacacaggggacataggcgacgcaggggatgctgcggcttttgcagacttcatgcattgtctgctcggctctcagctcaactgcaaaggcccaacagcggtgaatgcgcaccaggcaagagggctgattgtgagttctcagaaaagcaaaggaaagggactcgggggagcttgcgagattgattttgtcagttttcccctcgctttctcactgctgctcccagatgctacttgttcagaaatagcctgcatgtaaagagcccacacctcaggcaggaatgaatttctggaggtcagaggagctctggccccaggcatgctggctgcgccccgtcgacacagaacgcagcggaagcaaatcagttaaatgcacggaagtcaattgaagtatttccctccagtctgtcagctctatgcacattgattgggaggaccccttgttgttcagaagacagttttgccaccaaaggcctaactcgccctgaaaagtgcgcttttctgggatttatggtagtgcacggaatggtggaattcagtgggtgacaactgcatgctgcagccacaaaggacaatgtttgcagagtgtgctgcgtttcgcccagcaccgacattgttcacctctgtgtctgagcccagacgggggtctccacacggcacacatcaggtctgaagttttgctggcactggactctttcctctgccctccttccctactcgatcctcttcaaagcagcggttcccaacctttttggcaccagggatgggttttgtggaagacagtttttccatggatgggggtgggtaggggaacgtttttgggatgaaactgttccacctcagatcatcaggcattagattcccataaggagtgcacaacctcgatccctcgaacatgccattcccagtagggtttgctctcctataggaatctggtgccgctggcctgacaggaggcagagctcaggagataatctcactcgcccgctgctcacctcctgctgtgcacctcggtttctaacaggccacagagcggtaccggtccagggcctgggggctggggaccccttctttaaacgtttcttgccctcacccccagactactaacagctcccctgctgcctgtgaggctccctgccctgcccacccttcagggtgaagccaaagctctttgtcccctgggccctaacgtggtgaggcttcctgtccaccttcccagcattcagcacccagagcagagcaagcttcgggaaacagaagcaacatggatgtccctctccttccagtgtcctgtggccgcccttgcctgcagcaggagccctgttattctgggtgcttctgagggcccttccctctggctgcagccctgccaggagccagagccccagccccagctctcctcccacttgccctggctgctgagcatccatcccctgccctgggctgtgcccctatgccctggccccgaccatcttccatgtggatgggctgtgcatcctctgccctgggccttgtgcagggtcctttctgtccacaaggcccttccttctcccatctgtctgaaacctccgcagggcccagggcaaaggcatctcccatgcatagggcctactcagcactgcgagctctgttttctgcaccccttgctcgtggcctcccctgtgacagagttgcaggcacagcagggcgtaaccatgagctgcttgtccttctctgcactgggcctcattacttcccaactaaatgccaggggccaggcatggtccacgttctgaaaataccacaaaagtgaagcagacaaaattcctgcctgagaggttttgaatgcatgaggaatgaaagagggatcccattttggctgggtgtggtggctcgtgcctgtaatcctagcactttgggaggccgaggcgggcagattgcctgaggtcaggagttcgagaccaccctgggcaatatggtgaaacccctctctactaaaatacaaaaaattagccaggcttggcgtcgtgtgcctatagtcccagcttcagggggctgaggcaggagaattgcttgaacctctgaggcggaggttgcagtgagctgagattgcaccactgcacttcagcctgggcgacagagcgagactttgtctccaaaaaaaaaaaaaaaaaacaaaagatcccattttatcccttggatttcttagtaatcagcaactccatattttcctagttgtttttcctattttgtgccctcgttggttaacgattctcattcctgatgagactgtcaacctccctcaggcacagagcgcagctcccatactcttcacagaaggccactggcgctctgcctgtggccggcgcttcatggcgggtacccctctgtttactgacacctccaccttctcacacacagaggagtggagtttgcacgctcagtttcctcccaggcaggtgccgtgggcctttgaacgtgaggatgtcagaagggccaggaacatcggagtcctagtagaaatccctgattcttcatattccaactcattctgtctatgaatgctgcaagaactcaagtaattctctgattctccttgtgtcatgtaatattttatcgaatgcttctctgcgttcagtgaccagttgtatttagtcaccactaaccagccttgtacgttcttctcctccatgagagggggtgtgaaatcgtgaatcaaaaaacaaaatggaagagacgggaaactctttaaactgtaagacgtacatctttaagtgctgtgtctaccagacgaagttacttattagctcctactccagtggcctgaaatcactgaaacagctcacagtccagggcaagccacaccgcctcggtgtttggatagcatttctccatttctctacatgctgaactttggtttttgagtcacataaacatttctggcctttaaatcactcatcctgtgattaaactagaaaaatgacttaaactttttaagtttctaaagaaaaaacttagggttaggttaggtttctaaagaaatgaatgctcagtcacgctatgcagatctcagaggattttacaacttaccatgctgtcagagattcaacggagcattacatagataatgcttcacatgtgaattatgaatacttgctttgaatgataaaagaaaaatgatatatttttgaaggtgactgttataatgaatatattgatcactacactggtgaggaaaaggtagtttaaatcttttaaggtacacatgatgttggtaggttttatttgagctcttggagctattatcgggggtcagaaatgtctatgaaaaaggcagttggtttattggtggtcctcatacagaacaaagaatgcagtgagcagcaactgtttgttgaattaacatgtaggctgtttagttcacttttaatacagaactgacactggtcttcagtgaatggaataattttcataggatcatacacattttttggttatagatgcattgaagagtgactgaactagggctttgacttgggcttttagccataaatcatcagttgcctagataatttgaggcagtcttatatctgtattgttataccatagttgtaatgacctatcactaaaaggacatttagtcaattatatatctacatccaagtaatgaacaattaaaaaacattaaaaattattacatataatagcatcaaggaaacaaaatattaggtatacatttagcaaaaatgtacagaactttaaagctaacactagaaaatgctggtggaagaaatcaaagtgaacttatagagagacatactatgttcatgaattagaagactcaacatagtaaaactgttgattctttccccaaatcgatctacaggtttaatgaaattccaaatcaaattccagcaaagttttgtttagctagagacaggtggattctaaaactgtatggaaatccgagggagcaaaaatagccaaacaattgtgaaaaggacacataaagtgagaaaaacacattacctggttctaagattgactatgcagccatggtaactgaagacctgtggtgctagaggaaggacaggcacctagattaatggacagaatggagtccagagatagactcacccaaatctgaccagccgattcctggcaaagatcattcaatggaaaacactgtcttctcaacaaacagcattgaagcaattgaacatccatatgttaaaaaaaacaacgaccacgaaaaaccactttaacccaatccacaccttacacaagatttaactcaaaatagatcatagatcgttatctatgatgtaaaactataaaattttagaagcagccataggagaaaaaccttcatgacctgtgagtagacaagttcttagacctgacaccaaaacatcatctataaaaggaaaaaatggataaattggacctcatcaaagtttcaaaacttttgttttacaaaagacaccatcaagagaagaaaaagacaagctacagacagggagaaaatatttgcaaattacgtatctgacaaaggacttgaaagcagaatctgtaaagggctctcaagactcaaccagaagaaaacaaacaatttggtttaaaaatggactaaacccttgaataaacacttcagcaaagaggacgtagggagggtgaataagcagatgaaaagatgttcagcatcatcattagcatcaggaaaacacaaatcaaaaccgcgaggggataccgcaccgttagaatggctgaaataaaaaatgccaacattcccaagtgctgggaacgcaaactgtcactccttgaaacaatttggtagtttcttagaaagttaaccctatacttaccatatgaccctgtaattccatttcctgctttaaatactaaaggataaattacatgcttttggaaatggcttctataatgaatatattggccaccaatcttttgagggaaaagtaatttaaattttaataaaaacttatgtttatacaataaccagtacatgaatgttcatagcagctaaacccactagatttcactaaaaccttcaaacaacctgaatgctcttgaggggctgaagggataaacacactgtgctgtatccaggcatgaaatactgttcggcaataaaaatacaaactcttgttacaggcaacagcttagaggcctctccaaggaatcttgctgagtaaaagccgccattctaaaaggtttcatactgtgtggtcttatttatatgacatgccggaaaaggctgacctatattgggggaggtcagagctggggggcagggagtggagggagggtgcagtgtggaccacgagggagggggacgtgggaggatttggggttgtgtccttattatggcgctagctacacaaatccatacgtgcatcacaactcatagaagtgtacccccaaagcaagcccattttgttcattattttgtgaaatagaatatagaataaggccatttaacatgagctgtcattgtacagccagagatggaattcatgggtgcatcgtatcactgtgcaaattttctgattggcagtctcaggtctcccctgaaagtgttggcctctccttccgcctcggggctcctactgcctccccgacctttgcctagagcgtcctccccctccaaatgtctctgttttgggaaaatatagcctcttttggctgcaaccctcatctggcattggattgtcctttttagctttctgcaagcatcttccctctccagctagattttaatctttcagaggaaaaaagaaaaacttctgtgggatccccaaagctcccggcatttgactcacaaggtggagctcagcaaatagaaagtgaccagaggaacaaaagccttccatggcagccttgtgaaaagagcttgctgcagggagctgggaagctccagcccgggcctgacgccacctgtgtggccttcagcgagtcccctggggccctggggcttctggttcctcgcgggtgaaatgatgggactgaaacagagagtctccaagtcttcggttctagaattttactgagaagccaccttggaaaagcggcaaagcgtgtgagatcagcctctggtgagcttttatattggttgtttccggagactccagacctgggttttggtttatgttcctaaagagcttttgtgctgagcacgggaagaaaagcccaggagcacgcctcggtgtcaggctggtgacgacctcgggcaggggactgcgtggcccgcgtggacggatgctgcatctgagccactttttttttttttgagacggagtctcactttgtcccccaggctggagtgcagtggcgcgacctcggctcactgcaagctccgcctcccgggttcacgccactctcctgcctcaacctcccgagtagctgggactagaggctccgccaccacgcccggctgatttttttgtatttttagtagagacggggtttcactgtgttagccaggatggtctcgatctcctgacctcgtgatccgcccgcctcggcctcccaaagtgctgggattacaggcgtgagccaccacgcccggcctgagccactttttaaaaagtaatttttttattgtggtgaaacacacataaaacttaccattctaacaatttttaagtgtgcaattcagtggcacacatcacattcgcactgttgtaccagcatcaccgccatccatctccacaccctctccagcttcccgaactgaaacctggcccccatgaaacactcactctccatccctggccccagcgttcaagtcacttcttctctatgaacgggccacccgaggggcctcctgtgcatggagcctgcagcgtctgttctctgcggacggcttggtgcacttaccgcagtgccctccaggcgccccgtgctgcggcccccgtcagaatccccttccaccttccaccgttaggctgaacgacatccacggcaccgtatgcgcggattgctttctgctcatccattcacccttccggggacttctgggttgtttccaccttctggctctagttctcagtcacctttgaagtgacccaggctccccggagccacgctgatctgatttggccatgacattcccatgccctcgggtgactcgcagaagagatgcccgaacgccccaccctcctttccccaacagcctgaagtgaagctgccgaggttcccttattctttgaaggaatagcagcacgcggcatcgggacattgctgctcttttgaaggtcgacgtgcatttacatttatgagatgagacgtacacacagtgttagggtggcttggctgagaagtacagccctgtgtctgccccgctctcctgtgggtggctggttgcagggccatgatctgggtctgcagtcctttcatgcagccccttggctccttcctcgttgaccccacagccccttgctcaccacaaacccggctcagctcaattgtagaaacgcaccacctactccacggcttccagtggtgcaggaaatgtgatagatgcaaggtgtcagcggattttaagagcagtgttttggggggtttaagagcagtgttttgggggtttaagagcagtgttttgggggtttaagagcagtgttttggggggtttttcaatttatggggagtgggcacttatcattctgtcacaccttatgataaacaggttacctgttcctaggtgggaggagctgggagaagatgctaggccttaaagaaacaacgggaggaggtgaggggaggacgcaagctgggtggggcacttagggggtgaaggtgaactcaagtcacttcacagaccagccatgggggacgctgaagcgggtggcgcaccctcaagccttcccggaggagaccgctgagggcctgggccagcctcgcaacctccgcttcccccgtcaaccccatcagaagctctgagctgcggccccaggaacgcttgtgacgtataaggtcatcctgaaagtgaactgagagctgaacttcagctctctaggacagaaagggttcctgctgtttagtttaggtattttttttttttttgagacagtctcactctgttgtccaggctgaaatgcagtagcgtgatcttggctcactgcaacctcgctcctgggttcaagcgattctcatacctcagcctcccaagtagctgggattacaggcatgcaccaccatacctggctaatttttgttcagtggagacgagtttcaccatgttgcccaggctggtcttgaactcctggcctcaagcaatccacccaccttggcctcccaaagtgctgggattacaggtgtgagccaccgtgagccaccacacatggcctgcttactttttaggacacacatttagtaattccctgatatacttttagttgtactcactaaggtttaaaaaaagccaaaactgtgaacatttttggttattcattgagatttgtgtcttctgggccatccccaacctgtttcaagtactgcactttctttgtgggtgattaaaagcgaggaagagctaggatgtcagttgcactataaaagaagaaatggacacagggccgcaccttgtgatgtagactcagatgctggggggcatcctgcaacctgtgttttgccagctagagatgaggccaggacatttctgcaaaatttttggctaatttggagctgaatacctgggacagctgaagaattaaaaaaagacctgatttttaaaaactaatattttctattgtttagaaaaataatacatgctcatatgaagatatcccatgaaataagaaagtttgtggaaaaattctaccaccgaaggatgaccctggtttacactttgatgagcacattgttagatctggctttgtgcaaaaacacagacaaaatatgcaaatgccgttaaaagtgatcatactagacacactgttttcttcatctgagttttcttgttttactcaacagtgttggggcctcttcctatcagtagagcttttcatcacgatgcatagagcaacaacaacaacaaaatgacaaacgtttgcttggtaaataaaaataacttgctgaaaagtttttaaaatcacgggaggaagaccacgggtggccatttatttgtaaaagaaattcctttttccattaggctgtttgattgcatgatttttgaagaattattttcctcaacctgcgatgatacccatcaccagcaggcggagctcctgcgcacagcacccaggctgctgcccgccgcctgtttctctccagaaatcaggaagagggttgttgttgttttttttgtttttgtttttgtttttttattcccctgctttccaatttgttttaaggcctggggagctgggcgttctgaaactgggaagcagtaacagatgagttgccgcccgatgcatctgaagatcagcggctgcagggccaaggcatttcttggcagcatcatttccactcggattttattaaaggagatacgttgatggagtcactccctctcagaagaaatgtttacaattaatttgaaaaaagattaatattcacgggtgcctggagttggtaaaaaaagagttcaagctcttagttctttgtctgagagaggaatttaattgcttccctgaatcaacgatcataaggtcaatacgtgaagacctagtgagtttatggttctgagcctgtccgggtccctgcccacccggtccccactcacctggtccccgcccaccgggtccccgcccacccggttcccactcatagggtccccgctcactgtcccggaccctgaagctcatctcagcctccaggtgggaccatgcagggctggggcttgggggttcctcgcctgccatcccaggctggggtgtgcccgcgtttctcttccagaggagagtaaatcactagatacacgggtgtagatacacctacccagaagatcggcccagcgtagcctgacagtctccagccactccgcagcagtccacggcagctaatgagcctgccagggtacccacgctgcagttttaacagatgggcgaggtattggaggtctctactcctatttcacatggaatccttttggagacacaaggagaagtgtgcattcctagaacttggatgacttacttaagaaaatgcccgtaagaggccaggcacggtggctcacacctgtaatcccagaactttgggaggccaaggcgggtggatcacctgagatcaggagtttgagacctccctggccaacgtggcaaaaccccctctctactaaaatacgagaattagctgggcgtggtggcggacacctgtaatcccagctacttgggaggctgaggcaggagaatcacctgaacctgggaggcggaggttgcagtgagccgagatcaagccactgcactccagcctgggtgacaaagtgagacttcatctcaaaaaaaagaaaagaaaaaaagcctgtaagaaagttcctgctcatctacaccctcccctcatgatagtgttcttactgacacagccacgtgttggaacatcttctaactatcattagagatgatctgcctcctttcagatcacacatattaacacagtacattttgtttccccatttgtattgattatgtgccagttttggggaagtgggtcaaataactgagtgttgataacatctgccccattttcccacctgatgggatggagcacaggaagttggctccatgtggagttgccgcctggagacctctggcctctcgtaaacctggaatggtgcgttctcatggaggcaaccacggcagggtcccatgcacctggctctctccacctgggcctcccattagggcctttgctacagagatgcacccatcagcactcggctgtggagccttagcaagcacctgttcttccctttgtcgtgtggtccatgatgtcattgcagaatgacacgttagaaaaatgtctctttgttaatgtatctcaatatgcccagagagcagcatctaccatccagtggctaaatgcagtagggatttccttatgggcattgtcttaatcaagtaagtggtccaagttctaggaatgtacatgttttccctgtgtccccaaaaggattcaatgcaaagccagaatagagaaagcaaggcgtcttggttttaaaacacgaggtgtgatcgtaaaccaaaaatatcattcagcactgctcccacgtcaccactcattttacagatttgaatattgagatgcacagaggttcagggagctgctcgcagaggctgctagctgtctagggcttgaactttagactgcatgccaagcgagactcttgtggagtgaacgtaggatgagaggctcacgttacccacctgaaagtcagcggcctatggggaaattcactggctagtcataggagaaagggaaaagggaagggagaagaacggatttttaaattgtattttattacaagaatttgtagacttaccttgtagtaagttatgaagctattggctagaactaacagtgtgctcacagacgagaaaaataaactagtatctgtagacaaagtcaatgacatatgccagttagtgtctagggaatgagggaagcttcaattgctgctgtttaccaaaataattgggaactaattttctagtaaacactgatggatacaataaatgccagtgtagttaatgagatgagatttttcaattttctctgtcattttaaaagacgcatttctatgtaattaaaacaaagggcccatcagttcctcctttcagtggagagtgatgcctcaggactgacagatggcatcgtctggactgtcctattttgtctatgtgactgaaaaccaaccaaccaacatatctcctggtccttattcctttaatttccaggttgcacatggcgggtttttgcacacatccacaaagcggcattcgggacctctgctgttcatttcgacggtttcagcagtggccctgagagtgaagggcgaatgaatttgctttttactctttttacctcccagagtaatatttgattcttctggcactctcaggaagtgcagataccagagagctcagaagttaatctgaaaaaactcagagacagagagctcagggatgaatctgtgtggcctgttcagaaccacagaagatagtggtgtcactgtttttctgagctgccatgataagaaagaacagaggtatatttgatataatttttttcttgtgaaagtgataatatgcttcttcagtatattttttgaattaggaatcgtaaaatgtagttctagatgaaatagatgcaccttttctgccattttccctacatcacacttcttttgtggctcacagagatccttgacatccccagaaaccttgtttaagtgattaaatgatcctccttaaagatgctcaaaggagacagtcacctacgcagcatcttcctttctctccagggatcttctgttattcaatgcgtgcgtattttctacctaaaaaccggtgggagtgggaaacagcagaccccctgcaaactatctgaagcttagggtcatggtatctgtttcccatggaaactggaaccagcagctaaaacaggcaccagtgaaatcagtattattggacagaacatgggtgtcaaagtctgcaaggctggagatgagacgacacatccgactgtaaatggtgggccatgctgtctccccttttcttactctccatccccctgacttcataatgctctggcaattccgagaaatcacagaacactgtggttctcttttcaatactagttaaatactagttacaatactagttaaataatagcttcctctgaaaaaaagcacatatatatatatgtgtccccccccactccccgccgcaaggaagctattattcgatttctggtcaaacagctcctaccatgcctcaggagagtatgttagatttttttttaaaagcaagatcagggcattttagattttgcagtttggagagaattcttttctgtctgaatgacagatgcagtttttcctgtgtttttgccctttgccgggttgaagattatgtttattcctgaatcatcggctcgcacgagttaatgaaagtcacgggcatttactttctttacagaaagctgtgcaccatccagaatagcgggcttttctctatgtctgaaaaaattcacagacaagcctttcgttctgatgcagatttcaggtaacctgaggctgttacctcagctccttgcagaggatgcagctccttgcagatactgggaatgagagcgctgcagggtggcggccgctggcgcccgtggcttgtgtgtgtggtttcccttctggtgccctactcgggaggttgttgctttgccccatgacaggaaggatcagcgtttctcctcttagcaaactgtgaggctggatgcagagattcagatactgcttttgtagatgtggtcggggcatatctggttgtgttttctctcccatgtttcatggggaagtgaagctcccgtggcctcctttgggggcctttgcctctgtccgctggtgatacaggggtcggtatcagagacctcttggcacgaaaccttgtgggacccacattggggctctggctctgggcacagaaggatacaacaaatcaaagttcggcagcctgtgcttctgccattaagtaaaccctttcagtggctgcatttttctgatctgggtttaacctcaaagaggaagagctttgacgccgggttccagcttcctcatcctggtgagtgtgccgaagagggagaagcaacggaggtggacaaacggcacctgtcagaggcgaaagctgctgtcagattggcgaggaagtccttaaaatggttgtgtgctttccgccgggtggctgtgccatggcctctctggttggcaccttgatggcagcccgcccccaggtaccatgttgccatggcgtctccatgcaggagcacacccttcatgaccacagctccgggaagcagggtctctgttccttgtcccgagagacccacggaaaaaattcctcttcctcatggcaagagggactcctctcccacgggggaggctcagagacgtctgtttcccaaacgcagatgactcggagctgatggccagagagtgaagttctagtccagctgccccaaccatggggcttttgaggcttgattaccatttccttctgagaatggtgggagcagggattgatatgaggttcaccgctcggattttcattttacagtttcggaaactaaggccccagcacagaaacacagaggacccaaagctacagccttgaggggcagaggggccagggccagcagggcttttagagccagcactgccctccccagcagctctgagggtggccaggcctcttccagaatagcacgagtgtggagtggcactggggcagggttatgatgacaccaatgttttcagaggacgaggctcctgtggggcctttgcattgcttttcttgcttgatcagcacaacgttccaaagcatctgcaggacaggtgacgcttttgccaccattgctgtttcacaggagagggaaggaagctcagagaagacagacacctgccccaggtccacggctatgacgcagtgccatgagacctgagccaagcatttttggttcttcctcctgtgctttcccatggcacaaaatgctttgcttcctaaacgccagtgtgctgggtgatggtggattcagaggcagggcaggtctttccagaagcctccatgggcgccaaggctgaggggtggacagtgtcctccaagtcaggccaggagcacaagggtctgtgagaaagaggcagaaaggacgtccgaggactcggagacagtggctgctggaagcccagagcagccccttcctgctcaggtcagtgtcctgggccccaggccgagcctggagcttggaggagctggcaccgttggcggggccgagaggagccgccctgcccggggccacctttccagctgcaccactggcgccctcactccagcctccagtgcaggcccagcaccgggttccagggacctgcagcacgggatggacaggcaggcgggcaggcaggggctgagcagacagaggaactgcagagaacagtgggtccacttcccacgcagccattccccatcgtgcgtgttgctcctctcccctcagaatccttgcttccccagcttgcttttgggttctcgcatgtcgcaatattcccctactgtgctcccgctgcctgccttccagtcctcaaagaaaagagccctgtcagccccgagagcaccggtgtctctgggagtcagggagctcggagcagggtcccgtgctggagggggcaccgcagcacgggagccaggctgttctttgccttgttgcctatttcatagctggggtgtctcccttaccctcctggtgtgtttgcacagagagagagagggaagaggaagagagagacacgaagagggagggagagagggggaagtagacagacagagagacagggagggagaggacacagggtgaggtggacccaggcggaggccctctgttcagctcgcgtttctcagccgcagggcagggagttcttggttccgactctgctggttcctggcactgctcagcctgagccttccacccagctgcttctgtctccgttgggagctgacttcaagggtcctttgtcatggaatccctgcattttaaaatccctctgtattttaaaaccatttagtgcctccggccttgcaattccttcttccgtggctggtgccctcacagccactttcttgcaataataaagcatcccaaagtaccggaggaaggcattctaactcaaaagctccttctcagggacgagagagggaagctcctcgcttattcttccactcaatatgcaaatggcgtgggattgccaccgtcttcgggcaggggcacccctgggggctctcagaccagcccgcctgcaccctctgtgtgcacctcctgcagagatggcctctgtgagccaggcatcgccggcccctgctcagggggctggagggagaagttgaggcctctagcacgcatccctgggagggttctctgtccattaagagcaacgctgggagcccacacagcctgcccaggctttagtttcaacttacgcttatcttcattttcccttcattccatagacatgtaaataccacacacacccccacacaaacacacacgcacacacacccctactgcttttcctatctggaccagaatggggtgtccacaagtgcacaagtgctgagcacaaggagctgagtcctggaagcctgcagacttttaaccacctttccgcgtgtgtcctggagtgtgagcctcaggcagccacgtggacaaagcgttgtgtagaggatttacttatctttggccaggattttaaaggtatatgcaaaacctgtctaggatgaaactgtggagaacagaagggctgcttttccctgctaaataattttttttagaagaggaatgaagcattctgttgagtttcttactatgatctggataccaaagcctgggactctcatcctctccactctgcttggctacacggggtttctggcagaggctccatctctctgtggccagggtccactgaggacagcgtgcctctcgtggagcagggaacggggtaggggccaagccgctacctgccagcgcgtcacacactgggtgctgtgccacccttagctcacccctcccacacatcagatattcctgcacacacagtgaaaatcctccttctcgccagcactgctctccagggcggggccggcagggtcggtgcctcccaggcaggggctggtgcatgcagccccatcttggtctcagtgaagcccaggtggccacagccccagtgcaccccagagaagaggcctcccagaaggacgggggaccctcagaaactacctgcgggtagtggtggtgttttccatcaccaagagagccctcgaaaaccaagtgcggcttcacaaccaggacacgattcaagttaaacacagactctcaggatgggcttccaaaccactgagaccccctcagggtgcatggttgcctccacccctgtggcttcaggaagaaatccttctccccagccgcagccgccagtcactccaagtcccacgaccaccttggggctctcacctggcccttgtctggccccggctcccccagggcccttctgcccccaagccctggcttcctctgctgcactttcagccactgcctggactggccatcccggggccagcaggcacatcctcattcctcataaacctactcctggcccgcggcggtgcagccctggacagccaggcactagcatgatgtctgacatgcagccacacctggcggacgcttccccttcagggcctccaagttttggcatccgcaggcgtcctgtcccccgtgctcctgtgctccttgctgagtgtaaatggtccccccttgccggcctctgaagaggggtaccccagctctccctcaaacttggtgcgccattgagcatagctgtgaaatgttctcgctatttaggtacttgagcagctgtttccaatcttttgcacattcccatgcttaaaaagccaggtgccacggtgcagacggtggtggcctgggtctggaggggggcctggtggatgcaggtttgtggtgaccgctcctagtgtgcaaacggcagccctgctcacggtgacggcagtgccagctctgggcttgtccccttccccttctcctcctggctgtcctcttctttgtgagtgctcctggcacctatgtgctttgagaagccgtggcagccacacaaggagaagaggacaggccacagcgatagcccacttcctatgcagagcccagctgagctcaggtgaggacagagcccagagagaccagacgtcccaaggacactcatcgtttagagctcaattcaacccatgtttagtgagtactaaatgtctgctaggcactagttttcaaagcaaactcgggtatgcacgtggccatagaccaggccagccctcaataccagagccactcccgggcccctccacgcacttcaggcctcggcaaagtgaggcagactctcaccaaggctgcccatcatcctgagctgacagccataccctttgcagaggattccctccaaggattcaaaggcaggtcctccatgcccctcttgggcatttgtctcttcctgcagctgcttttccctgggggaggcctgcctccctgctttcacggcctcacagatgccccggaggctgggggtgggcccctggcagtgacactacctgccccgagggacagtggctgagagctcaggaaacggcaggtcacccctggccccgatgggtgaggacccgccggcgtcttaccttgtacatgttgcacagcccaggctggctgcgggcatgagagggcagagggctccggcccggctttagccagggtacctgccgggggacacagagtgggctgcgtgagtccgggtgggcgccgccggcaatgccccaaagtcctccagcaaatctcctctagagctggcttggcaagagcccagagtgaggaggagtgagcggggggtggaggatgaaggacgacagggagagaagaaggcatgtgcagatgatggatgatggaaggaagagcaagaggtgatgggaggtcagagggcaggcatgcgccctgaaggactcaggaaatcgagagcaaaaggaaagtttagggaagaattctctcctccaaagtctattctgaggccctgtatcaaacaatgggaccaagagttcttaatatggcagcaggcaccagctgtgaaagatttctaggatccagtgcagaaggcctttcccagtctggagcaaagtgcactaaaagggttttttgacgtctaccatggaatggataaattttacattccactttacttgcagagttgtattttttcttttatagcaagtgtgttatcttctgcattggatttacaggttgaaactttttctgctctgtgaaggttcagtgaaccgaggacggaccttttccgattttctgcagagcatgaggaaataatttttaggagcaatagtgttcaaaatcactttagccaattacttaaagttgattttcttgctgacattattccttggtactggtgaaggttaggaatttaacataagcaggaagttaatcttcctcagcaggagcaggagctacgcattcacctgagctctgcggctacaaatcttcctaagtagcattagctcctaacttaatgtattatctttgtcagttacacgagagtatctgctatatcaatgaactttgagggctgcagttgaaagactattattataggaccaaggtaagtgccctgcaagaaatgtctatttcttgactatcagctacagcaaaatgaagacagagagagaagagaaagaggagacttatagtggtcaagagatgaaatcagcgtaataggtttcaggagatgtattggctgcagatgaaatggattcttttaaccaggttagcagctgagtatgcatgagaatagagtagttccgacactgaagaatgtgggagcattctagaagtattatggaaagtgaacacaccggggttttcagaggcaaatctgtggtgagtgtgtgcttagctgtacgtctcctgatggattctccctgcatgagagaggctatttctaggttagcaggaatttctggtgactttaattcatgatattaaaggtaagtaaattgagtattcactttagaggaggtctccgtggataagcctgcgggagttgctgtgctgatgagacttggctgtcctcataagcagtgactcccatcagctggtgtccatgagcgtgagcaagtgtacgctatgtacagggccaacaagcgaagaactttccattaattttccctccatctcctacaatggctcttcttcacaaagaagatcatcactgtgaggcatgttctcgtggctctggtgggctggcgtgaagcccctctactgactccctgtctactcatggggaaggcaggtggctggggtagccataagacatcccactgatggttttcaggaaatgcaacctgtaaccccggctgcctgccactcccagagccaggaagagggaggacaaatgcaagggccagagaagacgaaaggcaagaatagcctcttaggagaaattgtgtgtgctaagcccgcttgtatggggctccctcaagagagttcagtgttctttagctgtttcttcttttttactacgtttttatgaagtaggatgatttcagagcattaagagtgtgctgatagccataaaggaaaaaacttttaaaaacattgaatcagggtttgataggaaatgtccacacttcttaaatttgtatcaatatctaagtgattttcacgagtgctattgtgtgtttttttctaaggatgatctattccctcagatgtcaagccaagctcctaattcaccgatcagaattgcctgttatcaaatgtccagactttttatcaaaggaaaatcaacgatgagagaaatgaatgctttaaaatgcaaatgagtttaaagggaggagatgagttaagacgagggtctgatgggacatgaaaggcaggaccgcatccaagccaatcacttatctttactcttgtttctaatttctcaaagaccccaagtttcagcttcatctcatacactcattatcatctttcagagagccagcaccatcccctcatttcagtgtctcgaggttcccatgacccccgttgtgtgtgagctcccggggggccctgtgggcactggcacccatgtgcacgttcattcaggagatgctggtggggcgggctgtgtccatgacagcacctgccagtgggatctgctcagcgtccaccctccctaacatttgcgggatgatgctttgagagaaacacaagaaacttcaggcagaatcagaatagtcaccatagaaagaccagaacaccgaactgtcaggggagagaagacagtaaaatgtctctgtgtagtaaaagcagatgagtgagcaactgtgaccttcccacacagaagcacaggtcaggtgagagaagacagtaaaatgtctctgtgtagtaaaagcagatgagtgagcaactgtgaccttcccacacagaagggcaggagctcgggtgctcacacttacctgccagctgtgtcaccaggccacaaaaatgccggcaacacagcacactgacgtggtgggggcaaccaaaccaaaaacgacaaattaaagaagttcgcatgcaattagtacactgtccttggtctgttaaactgtttaatgaatgcataaaaaggcagaaaaatatataaagccaaaagctcataataaaattaaatcatgatacaaccaccacaggcaattaccatcaaatacattcccatgatttacaaatgtatcgcttatacagaggaagttgcaaaatcactgccagtacagacacatccagtctaattaactatcgtctattcatacaacagcaacaactgcagctcctgagaccacagaaggacacagtgagcagctggtgactgagccagggtagcctccgatcaataactgatcagagtaatgagactttgagaggaatgcctataagaaatctcaaaaggtatttgtttgggtgcagaaacaaatgcaccctccacatttggattttctctagaagaatctgtggccaaatctcttatccaatggaggtactgagtggctggatcagttaccatgcaagctcacgatgaatgagattgaatttggttctgtgtgcacactgggctctggggagggaggacacccctgtgtgttgctgctgccttccgtgctgtctactgtatccttcatgtgtctccaaatggtacacgccccatgggattacagaacacagctacagaattaggatctcatggtaacaatgaggaattaggttactgtagaactaaaatatgtttaatgaaattaaaatgcaatggaaaaaaaatcaggcaacagaacattctgatgaatttacaggactgattatatcccacggcactgaatgacaaacagttcttctccatacagtcgcaattagaggcatagaagtcatactgaatgctgaatagaagaacactgagaagagcaggttataaatgaaggttttcacataaaacagaaaaatagacaaaatcatcggtaagaagctagctttcgaaaacctccctaaaagtacacggcacggagaagtggggtactgggatgtcctggctgctttctgctttgggaactatccaagtggcacatcaccatgtccagcttaggtgtcttgtgaaaccttacttcctccacataaaaaggaaggaacggtttccaaagctaatgtttccaggctctgcctcgtgacactcaagtggcctcagatatgagcactggcacagagtgatgctggagaggtcacttagagagaagctgccgggccaagcacacgacaatcttggccctaagtgctcacccattcctcatgtgaccctgacattccggggaactgggaaacctgttccttaaaggcaacaacagtcctttctttcctctcacaacaaaggagcatgttctccgtgaatgcacttttcatttacggctctcaaaagaatatgccttctcaaggaatttttaatgcacttttcttgaatgtcagctcccagcaacacaagcatgggtgttgttagggcattcccgggctcgggggcggccgctccaacatgtggtaccagcggccatgtgccctcaaggggagggaggaagagcacaggagggtgggaggaggacaaacagccccttttatagggtcatgggggggctccactcagagtctggcaggaatctgccaggaaaacctcgttctagatagggagaagcagaactgtgtgtggggcaggccgccgtggtcctgagagacagggcccgggccttccactgctcgtttgcacacctcttcggcctatcccaaggaccttcctagcatataaaaacaggggctctcctgatttgtaaacagaacaacaaataaaaataaaaacaaaaccaaaaattcctccatggcagcccacccaatgaataccccagatttttagggccattgcgggtctgtagctgggtgtagagagagttaagctttcatctcccatgtttacaacactttgtgataaaatagttgagtggagcaatcacatccccactgcgtgcgctcccccgggatgcctcacagctgctctgtgatcacacgtgcaaatgttattattattattttttgcctttggcatcaaagggcaagcctgttcattaaaaaatcttctatattcaacactccatagtgaaaagaatggatacttcaaaattcctaaagcaatcatgtgaaaattatttttatttttaaaatttttgaaagtgttttgatttttatgggtccttgataattggccagccctgttttgcaaagagatggactatttctgagactagaatgttttctttgaaaatattgaagagtataagagatttaagacaataaaggctgtaatcttaccataaaggaagaaaaacatctatgtgtgtcaatattgttttgagataaagtcacaatgattgatatcaatgctttcaccattttatttcaacttaaaccagtgtcactcacatgaagcttattttataatacatattatccagtgatttcatcttttctgcacagtttaagtacattttttttttctgtaccttgaagtaagcagaatagttcaagctttcaaaactggtgatgctgtatgcgtgagggatgcttacataatagcaacgctttattgggcaacccgaatccatacatgtctggtgtggtttgatagctgggcttgaaaaagtgcttccagttgaaattagcattagaaatcggttagaacaccaacatttcagggtgagggaggactgctacaaaggaaaagaacatgtctacaaatgcactgaaagaactagccagaatatgaattccattagtatctaagacacacaaaatgtcatttacaaataagtcacggcaagtgtcacaacctgaaatctcaactcagacagatggtagagatgttaacagttgcctgaaacttcgatgtgctttcacgcccacaggaaaggtaaaactgacatttgtgtttctcttcaacaatttcatgatcaataaagaattgcagttggagactaaagcaaattctagaaactccttaactccaagttgccctatggtttttatgattgcatgttatcagaatgaggcgctctgttccacactttattcaaaagccttttacgctcccacaaggccttctggaattccagaatcagccctgcacacaggcagaaaaacagcttcatcttacaggttgtgtgagaacacccaataaactagggacttttttgggaaaaacttctttctctccaaaattacacaaccaccaaacactctaaacatcacgtaaaatactgcatctgcaatctgaatggcactcagggaccagcgctttgatgaaccagcagccacaggttctccactgacaatcaactgcagaaaccactcctagactctggaccccatagcagagttttttttttttgtaatacatttttatccacatttgcttttgaataaagaaacttctaagactctgtatgcaaattaatggaatcacaagataataaagctttgattcatagacactcatttatccctccccccttccacttctcagaccacagagaacgtttgctcaaggcggatttaaattgaggagtttgttcaaaagtcttcctcgacctcaatcctatgattgtcgcagagcaacatgaagctagcagcactgactccaggaaaaaacgagcataacccagtgttgaaccccagcgtgtgggctgcagaggcaacatcagtcatcaagtccgcaagcacacaccaccagagaccctgagaatgtggctctctttctgcaacgcccatgtccaggcacccttagagatccagaattcagcatgtccttacattcctgagccacaccccggccaccatcccttgtgaggaaaagagggggtgagttaaacgaaaacgtcctaagcagccactcaggcccacactcttgggctcatatgcattctccagcacggaacgagaccttagacagcaagaggctacgtgccagttcttcctctaatggctgagttcacctactgatttctcctttgctttttccatttaaactaaaactcctctactcctcagagctcaccttgccagagccccgcttgggcgcacccctgtcaccgccaaagaagcgcccgatggagtcaaggatgcccgtgtctctgtgccttgggaggaagccatgcctggcatggtccatggtacttgctgtggccaggtacttggatccgtgcctctgggagggtctcttctgtgacgccatcacatccaggctctcggaggtggctgcactgtcttcttggatggtctggagctcgtcggactcagagggcctgtctttgaaggtgttgtcctccctccccggggcatctcgggaaaagaggcggatcaagtgggggcggctccctgggtcagctgggtgggcatcctgccaggcattcttcgggtccgctgtgcgcttggagtcagtcaccgctgtgtcctgagaggaggtcccattgttctggttcgcatctgcctctcctgcaaacaacaatgagatatgaatacgggcctgtgcaaagctgagcaccggacaaagcagctttctctgaggggtcttgacctagctgtctcctataaaacccacagaatatgtgcagtcctcataaagcccttggcctaggatggagctaacctggatggagcagccttattgcagctctgtgtttcagaaggctctgggaattcctcagttactcgagatttggcacccagcgtaaaatgcacccaggcttcccgatgaagtcatctgagcatgcagagcagccacatcagcgtttcttcccgggtgctgccatggctgctcccggagagcccagatgtgcaggcaccttgatgggacattgactgtttaaaaggccactggtgcataagttaaatatgcaaggagcatttatttgacaaaaggtgtttttagttttcttggtagaaacaaaacttgccacatctttttgcaattcatgcatgaaagaagtggggcatttagaattgtttcaatcccagattccacaagaggcctctcacaatagagaactgcttattcaggacattttgacttggcttctcctctggaagcagaaacaattagaaatctgaagtgggattgagatatttcatgttgtataccagcatctcatagctttctccaaaaaataccacatttctgtcacgaagggcaatgaatccattttgctttcaagttagagtgttaggtttaaataaatatcatttagttagtttcctctccaaactctattacttatctacagaaaacaggattcactcacatattcctgtaataccagtcatccatctatctctctatccattcatccatccatccacataacagtccatttacccatccatccatctatccatccatccatacacacacccacctacccatccatccatccatgcatccatccatcccccatccactcatccatccgttcacccatccacccactcctccatctatccactcatccatccatccactcatgcatccatccatccacatatcagtccatttactcatccatccatctatccatccatccatacacatacccacctacccatccatccatccatcccccatccactcatccatccacccacccaccatctatccactcatgcatgcatgcatccatcaattcatccattcgtcatccatccatccacatatcagtccatttacccatccatccatctatccatccatccatacacacacccacctacccatccatctatccatcccccatccactcatccatccattcatccatccacccacccctccatctatccactcatccatccatccatccatccatccatccacatatcagtccatttacccatttatccatctatccatccattccatccatcccccatccactcatacatccattcatccatccatccacccctccatctatccactcatccatccatccatccatccatccatccatccacatatcagtccatttacccatttatccatctatccatccatccatccatatatccacccatccatccatccactcatccatctatccatccatccatccatccatccatccatccatccatccatccatccactcatgtattcatccatttacctacctgttcatccatccatctatccattcatccatccatccatccatccatccatccatccatccactcatgtatccatctatttacctacctgttcatccatccatccatccatccatccatccatccatccatccatccatccattatttatgagtaccaaataggtgtaatgtaccattctaaatatctgagttacagtgattgtaattcacgaggtccttgtcctcgtgaaacctacattctagtggggaaagcaggtgaaaatgtatgttatggattgaatagtatccctccaaatgatatgtccatgtcctaacttctgtacctgtgagtgtgaccttatttggaaatagatctttgcaggtggaatcaagtgaagatgaggtcattctgcagtagggtgggccctactccaatcactggtgtccttgtaagaagagagcagtttggacacagccacagatgcacaggggagaggtgtgaagatggaggaggagcctggaggggggcatctacaaacctcagaacaccaagcacttctggcaccaccaggagtaagagacatggagcaaattctcctgtagagccttcgggggaagcagggctctgcagacatctcaacttgagctttctggccttcacaatggtcacagaagaattcctgtagtttgaagcccccagcatatggtaatttgtcttggcagccccaactcatgcaatgtgcaacttcacatcaggcaagagaacaggaaagcagagagggcttgggtcagcaggaaggtccttgcggaaatgacaggacaagatgagagtctgggccctgcgaggacttggggaagttggggagggtgcttctggcagaggggaaggcagcccccactggaagcctgcgcggaatcggctcccggtggcggaagcagcaggagagcggccatgctggttctgggtccaggaggatggccgggctgagaacctcccaggccaggcagtaacctgggaggcaggagggcctgtgcagggaactgaccatctgtgagcaacagcaggggtatcacagccttgatggctgtgaacagactgtggaaagggcagagcaggcagctatgtggcgagaagacagggcttggtttggggagcagcggggcctggggagggaagattctagtggacggcctctgtggagggatatgatggagatggtggtacccagaggccgggggcaccttggcttccatcctgagcaattgggagagggacagggactgggagtctggctgggacactaaggaaagaaaggtctctggcctggggtgggggagtggggagagtggctgcaggtggcctggttggggaaggtgtagacagggaaccagcgaacagttgagaatgcatgcctgccaagcgaccaagagtgagcagtggacagatattcttctacgtcggtttccacaaaggacctctttcagtaactgccctggggtccccgtgacccctccagtttccctgacttgctaggagagctcccgggacttaggatatggtcctgtcactgctatgactcattgcaatgagaggtgcatggcgaagtccaggaacccctcctcagagtcacatgggaggctgaatttcccagcacatgctgtgaccccatgtgtgacatgctgtctgttagggaggctcgttagagacccttcccagggctttactcggggctggtctcataggctgcctcgcttggtgccaccaagattccagccttcagaggaaaggcgctgttctgcacagaccatgtggtgctcacagctgttccggcacagcgaaccaccctcccggttagggcatggtgggtgggagcactctggaaacccgcattcccagaccacaccccgggacctagctcaccacaggcctgcctaagagtggacggctccaggctgcagtgtgaactcttttctgcacaattactaagaggcaggaaagtcataaagacgttggtgaggaaaagatgtttctcatgtggtttggttcacactaaaaatactttgagggcatttcttcacgtggactgagaagacacataacttgggggatgttaagttgttaaactaaatgtctggaagagtgttgtcttctgagaaagagtcctccaccctccgctccgtacagccttggtatcagcagctctgaagatgaagccgtaggagcagcctctcgggtggaagattctacgtctcttggcagcagctctcagggagagtgggactgacacatttcccacctgagttaagtttgtacttggtaaggttaggtgacccccgctctggtgcacacacacccacgtgtacacacacacacgcaaacaggcagagcaccaccagaattggaacccaggttcagcaattcttgtagaaactttaaataaaaatgcaatttcctcttgcattaatagcactattgactaagccagatgacagcctgctagcctcccaggtggctgaccttgggcgatgctgtagataaaacaatgcctgtgaagatgcacctttttttttttttttttttgagatggagtctcactctgtcgcccaggttggagtgtgatggcacaatctcagctcaccgcaacctccgcctcccgggttcacgccattctcctgcgtcagcctcccaagtagctgggattacaggcgcctgccactgtgcccagctaattttttgtatttttagtagagactgggtttcactatgttggccaggctggtctcgaactcctgacctcgtgatccacctgcctcggccccgcaaagtgcttggattacaggtgtgagccaccgtgcccagcctctacttttaagccatcatgagcacttggactccaatgcagctcctttctttatttctcagtgtatttcccggggtctttggccaactgcagcgggtggccttttttgaatctgagaacgcacggtgacacaggccccttcagcactgaggtctcatctgggggatgcgaagaggggagggcaccagttctgggggtggtggcatgggaggagtgaggtggggttgctttccttctgctgctgatagtcgtggatgtttgcacacttacaactctcgctcattggaaaaaggattccagtgcttctgatttttttaatcaaaatcatctgggttgagaaactgccctgtaagtgagacgtatcatgcagtccacataagacctggttccaaggcaggttaacctgctctcacatacattacagatgtttgccaacagcaaagtgtaaagccagcagttggaacccagggtcgcggtggtctcgtccatgcacccaagggattgcgtacggctgccagtgtgactgtgctggctgagccctgtgcctgaaaaataggtcacctgctccaggacaagtgcggaaaaggcaggaccaggtggggcgggagacttcggtggcaccgttcttccatgaccactggtgaaattcaactatgtaagaacgctaagctttataacatattattaagtacatcattgcactgtagtgtttgaaaaagcaacgtgaagaatactgtggtcagtacaaagctgcagtttttgcagggtgcaatgcttatttataggttgcaagaacaacagaaatgattagtctgattttatagctgtgctttatgttctctagctaatataaattaatgcaaatgtgaaaggaaaacaatagctatattgtacataattaaatgcattaacaaaacacaagaacatctgaatactaatatttttgcaacagttgggctttgtgtccctgaatgcagttatttgtgaggcacagagaagggcatttttgtccccaaagtagcttctcccaacacataagaagtatgcgaagaagtctaaatctatggatgtgcagcgtttttggtaggggcgagtgcagtttagtcgttaatattgccttcagtcaaacgaaatcccaatgcagacttttacatttggatatttatagagcagagcattattacacaattagtgaaacatgcagatctacattttccaaaatatgtacttataatattttctgtggtattaatcgatttctgcaattgcaggaaaacttccttaaacaacaacaccacaccctaatcttattgctaggacaatgctggcctttagaaggtggtgatattcaaatcactgaccatctgtgagcaacaacaggggtatcatgtatctccgagtggtttctgaggcacagaaatgcacagcaggacgcagctgtgatatgtgggggatagcgtttactaaataaagaaactcaggcgtcatgacctgaggaagctcatcttccactgaggtggtgttaatgaaaggtcacgtggcctcatttttacagtgtgactggctgcttccagtggctcatccccagcacacaagcgtcgccaggtcctgccactccttcttttggactatttcttatgtgaccacaaccccccgcttcctttgcttgctgccgctttctgctggggctctcactgcgacatcgtggctaattccctcatctccaggatcccttcgtgggttccactgcctgcacaaccgctggaccatccgtaaagggctttgcaacacaaggctcctaactcatgcgcctgcacggactcctcattctatgagctccaaggacacactcctctctctgccattgggttcccttgttctcctccgtggcgccatgtgcaatgctgcaggcccttgacctctgtggtctcaacaatggccacgctgctgcctctgcctccaggtccccaccctggggaggctggccctgggaggcccagacacccttctccgagtgcgtcttaccctccagtaccacagagtcactccttagttctcttctaatcgcctcatatttgctttgttctctccagtcaagtgacctcctctccgagggccagggaccaggctctgtttattctctaacatatctgggatggtgtggggcctccacagatgtccaacaagcattgaacgtttgctaatagaagatgctgatatttactggagtatactccaaaaggaaagacaccaaaccccccactcttctttgctagaaaaacttagattttggcatgatagctgttaagctgctttttatatacttatttttaagtcagcctctacacccatggtctaaagcaagcttgtccaacctgcagcccacaggccgcatgcagcccaggatgcctttgaacgcagcccaatacaaattcataaactttcttaaaacattatgagttattttgtgacttttttctttagctcatcaactattgttagtgtattttatgtgtgacccaagacaattcttcttcttccaatgtggcccagggaagccaaaagattggataccccggtctaaagaattctgtttagaaattaatttctgtagcaaaatttcactctttctggttctgcagagagttttctaatatggtaaataaaaccatttagcatggctctgaagttccagaatacagaattaaacttttctgctttatcctttcctaaagtccaaaccctaatttatgcttttggatgtgttgctcagatgaaacatggatggccaagcgggaccgccttccacaagccccaggccctcgtgctctgcagtttccttggagcaaatcaaagcatgtgggcgacggagaatcggccgtcgtggcagcgccagggcctgcagtcgccagggtggggctgaggccagggccggaggtctgggcagaaccacagggaaggaccttggaggccgacctcagtcccaacactgaccagccgatgtgctccagcaagtcgctgagcccagatgtgcctgtttctgtgtttatgagatgggagcattcatttctattcttacctgaaataaccccaggctcctttccgcagcagcacactgacctgggtgacgtgtcctccccatgccaccctcccacaaacgctgccttccacccacagcacccgcagagagtggcagagagggcattcctgagcagattgcaggagttttgggaggtgcatgtgtgcattctcgtaactctccgaggcgggtggttttagtagcccttttattcataccagaaactgagacttagcaaagttaaggtgggattgatggaggagctgccgttcactcctgcctaaactccctccgtatgttctagaaacgcaggcgatcccccacctctagctgtctgacaccagcccttctccagcccaaagtggctttcactgcagccaggcttttcctctcagggtaaaattgaactgcagataatcgatggctgacgcatctgtggctagcagctgcttcacggagggctgaccaggagagacccagaggctttctgatctgtcgggagccaagagctgagccagggcccccgcctgcagccacagggacctcgagtgcactcagcggtcttggtgcaccatagccacctggacatcgatacgttaatgactgttaaacatgaacaaaagccgagtcccacactccaggacattcaacacccacccgacagtctgtccgagtgttacctccaacagtatgaagctcaccgtgcaacggctccaggcttgtttaggaaactgtcccactctcatcttgctctaatcagaacatggcaggaatcaaatatccatacctgactgtctccagtagaatggtgatgacagagcggacactgtcctctattgaaatacttttttttttttttttttttacctagagcatgtttctcgtgctccattcccctgcatccgtggaaatcacatcgcacaagtaacttccatcaaaaccagcacgtgtgagagacaaacatctgggttcccaggcacaccccacaccctgagtaaaccaggacggacaggccgaggttccgctgctgcctttctggcacacgcaggggagcagtgggcagcgggttactccctctccgaaaaaccgtccttctccccatgccctgcggcaccgtgagtgcatcgctcatcccgctcgctgtgctcccagcctgtgccatggaacctgctcaactgcggagcctgggatgaggctgagcctgttgctcttcctgttgagtttggtttcgaccaccctgcatgaatctttgtgcttccaatgcttctggtcagggggccctgccgcctcgtttcagggacggtgcctgcaggccgctgtctgtgcctgaactcagcgcttttcacgctggcttgacccacggagggcggctgtcagccgcaaccggaggcagagcgcgggcgttctgaggctattggatgaggctcgctggtgataccttctgggtttgcaactttgttctaaagccaggggttttcaggccaacagaaatgcatttagttagtaatccagagcatgccataggaaaacataacgaataaaactagaataaaacataacgcagaaatcaccttctccacgaaggcaatcacactacccaatttaactataacacggtggacttctgtggatgagatgatactatccttcttttcactacaattaattaaatgttgtccccttttattagagatctcaaaacattagacctaagggatcatccaaatataatttcactagggaattttaataaaatgtccaagcagatcttaaatggggaggatggcttcaggctggaagtttgagacaaccctgagcaacgcagcaagaccttgtctttacaaaaaaaattaaaaattagctgggatggtctcatgtacctgtagtcccagctcctcaggaggctgaggtgggaggatcacttaagcccaggaagttgaggctgcagtcagctattatcaagccactgcactccagcatgggcaacagagcaagaccccgtctctaaataaatacataatttttttctgtcaaaatatctggtggacatcacgtccaagcagatcttaaatgagacagaaggcaatgaaaattaccatccctcaggtaacttgagggtttcccaacaataagctctaagacatgcagtggaggcttagcctgccgtgagtcgccactgttggcttattttatgtatttgcatcgttcccatctaaatggggattcccagacttcataggccagtaaaataggaaaagttagggatgaaaatgacaggcctttgtctcgccacctcaaaactcccaagtttttattttgccagctaagacattaaaaaaaaagcagacaactaccatgtactgggaatataatttcacaaaagaattttggaatcagtagaatgggaagagcctgtcctcaggatgaaaggctatggaatacacttagcttcattaaagtgacattgtagggttgctttttgatctgctgcaaagaccctgtatctgcctgcacacgcctgcccgcacacgcctgctgaggcccaccgagcagaggctgcaacgtctagccctgctggtgtccccctgggcaggggcagggccagggacagcatcagagagcaccaggtctccgacagataagacattcagacccagctccccgccctcggcacacattccagaccccacaggccccttgcatacacatagagctcacaactctcatttggccacagacaactaaaaacttccccacagaggggcttttggtaaccacttttctgtatattttcaacatgacgtccaccagatattttgacagaaaaaaattatttatttatttagagatggggtcttgctcagttgcccatgctggagtgcagtggcttgataatagctgactgcagcctcaacttcctgggcttaagtgatcctcccacctcagcctcctgaggagctgtgactacaggtacatgagaccatcgcagccaatttttaatttttttttgtaaagacaaggtcttgctgtgttgctcagggttgtctcaaacttccagcctcaagccatcctcctgtcttggcttcccaagtagctggcatgagccactgccccagctaatttttatttatttatttatttatttttttattgatcattcttgggtgtttcttgcagagggggatttggcagggtcataggacaatagtggagggaaggtcagcagataaacaagtgaacaaaggtctctggttttcctaggcagaggaccctgcggccttccgcagtgtttgtgtccctgggtacttaagattagggagtggtgatgactcttaacgagcatgctgccttcaagcatctgtttaacaaagcacatcttgcaccgcccttaatccatttaaccctgagtggacacagcacatgtttcagagagcacagggttgggggtaaggtcaccgatcaacaggatcccaaggcagaagaatttttcttagtacagaacaaaatgaaaagtctcccatgtctacctctttctacacagacacggcaaccatccgatttctcaatcttttccccacctttcccccctttctattccacaaaaccgccattgtcatcatggcccgttctcaatgagctgttgggtacacctcccagacggggtggtggccgggcagaggggctcctcacttcccagtaggggcggccgggcagaggcgcccctcacctcccggacggggcggctggccgggcggggggctgacccccccccacctccctcccggacggggcagctggctgggcagaggggctcctcacttcccagtaggggcggccgggcagaggcgcccctcacctcccggacggggcggctggccaggcggggggctgatccccccacctccctcccggacggggtggctgctgggcggagggactcctgacttctcagacggggcggccgggcagagacgctcctcacttcccagatgtgatggcggccgggcagaggcgctcctcacttcccagatgggatggcggccgggcagagactctcctcactttccagactgggcagccaggcagaggggctccatcccagacaatgggcggccaggcagagacgctcctcacttcccagacggggtggcggccgggcagaggctgcaatctcggcactttgggaggccaaggcaggcggctgggaggtggaggttgtagcgagccgagatctcgccactgcaccccagcctgggcaccattgagcactgagtgaacgagactccgtctgcaatcccggcacctcgggaggccgaggctggcggatcactcgcggttaggagctggagaccagcccggccaacacagcgaaaccccggctccaccaaaaaaatacgaaaaccagtcaggcgtggcggcgcgcgcctgcaatcgcaggcactcggcaggctgaggcaggagaatcaggcaggggggttgcagtgagccgagatggcagcagtacagtccagcttcggctcggcatcagagggagaccgtggaaagagagggagagggagaccgtggggagagggagagggagggggagggggagggggagggggagagggaccccagctaattttttaaactttttgcagagatggggtcttgccacgtttcccagacttgtctcaaactccaggtctcaagcaatccttctgccttggcctcccaaagtgctgggatgacaggcatgagacattgtgcccatccctgatttatttcagagatcaacataataatagactcactcgttctccacatttttaccttggctttaaaagtagtatgttttggtagcgcatctagttaggtttaaagcccagagtacaattttggttagttttgagtgttctatgttcccataaaatgaccacacacacacacacaaacacacacacacacacgcagtcaccactgacctgatttgacagatctgtcctctaccaccaggaaatttagcccggaaactaataattttcctggctcaaaaatccaggtttccagcttaccgtccacagatatccttcttgtaggtctgacccacacagggaacctagacacaatcttaggggcctcacagggccccactccccagccaccaaaatgcacttccagatcatctttttagggcctagagtccacacgattgcctaaggaaattttgggatctatcacattaaaatacaagcaactggaaaggagagtccccagaggctcaggcaatggttaggaggctgggaatcaggcaatggttaggaggctgggaatcagacaatggttaggaggctgggaatggctcctggaaatattactgcttcttcctttattttccatgattggcaatccagctataaggccatacagtatccgaggcagaaagtactggaaggagacccaagagcccatggtactattcacgtagggactctgtgtggaaagagctctgaacagggcagccacttctgagggctgacgaggcctccacacagggacgggaagggacaggaagggacgggaagctttggttacttttgtcttaaatgcacaatggcagaattcattggagcaggacggccctgtggtaccggtacatggaacaattttctctgacagtgatttgcaatctggttttctagcccacagttgctttaggaagtattttccaaaaataaatccatatatctaaatacaccaaaatgtgttattttccataattgctcaaattaatccttagctgctaactaaaaacagcagcatggaacaggtcaaggaaactattattgtggaattcacacaatggaaaaatgtttaattatttggtttgtgatttggtgtttttaaagctatgcttttttaaacatacacatttctcccatatccttttatcagacggtatcttcaaggtgactgaggctaccggggccactgtgtgatctagattcctgtaactgaccctgtttcagaccttctcttatggggaccagttgtcactgcaaaataagagtctgcatagctaagttcaagtcaagtccttcgggggcaacctggtatctgtggaagagggaattctgaagtcacaaaaccattctttatggtcaagaaactctaaagccatacagacactgttttagagaaataaagaaaagttatccaattcttcagccattgcaaaaaaaaaaaatcctattttcagaaaatcaaaagaaggtgatactgtttcctctagcccaggaaaaaccatataaaaactccacactaaactgaaataagataatacaactttcctcaagtggcctttctaaattttaattctcaatttgcttctaatggtggtgagacgttttggagttgttacaattggctttttacctaaagcagtttggcagatgccagacagacccccgaggctgtgagcatgcccgccctgctgcccaccctctcacaccccgtgtgggccaccacctgccctgccagcctctgctcagagcctccaccctcacctgcagacacctccaattcccctacaagcgcagatttcaggaacacgtgaagaaagctaagaaaaaggaggcagggagtattccatttgtttagacctgaagccggtcaggttctcatttttgtggatgttttgacgcaagtaattcactatctggacacaatttccagggtactgttctgtaagtgagctccttgatgtctttaacactgggtgtgctgacatatctaatagacgaacatcttgttgcattttacatgctaagctgcagaagaaacaatgcaccagggcctatttgcagaccatcagcctcttggcacgaggagggcattgcccgtgcagctctgctggctctaatgggctcctggtccgtgcctctccatttggccaccttggacaggctgtacactggctgcagagtgggccgcaggtgacctctctcatggatggggagaggcttgcaggctgtgcccagtgggagccagggcttttgtcgagcactcagctccagctcctgtccagcagatagatagtctgctccctgcctgtgaagagtcggacagaaactttgagcgatggcaacgacaacaagtgtgttttctgggggtggaggtgaggagagcttggggctaaaggtgcagaaccgagctttaagctgtggccccttgtcccactggagaaggcgccgggggcacgcagggcctccactctcctggcccctctcaaggaggccgagccctgcagagaccatggaatttggaagtgtgggccagggccaaagaggacgctccttgtttgtggaatacttgtgtcacggcgcgctgtgcttggggtcaccagggagggcaaaggaaacaaaaagggccatggtgtggcctgtggatttgcgatggcagaaattctgcatctatgagaggcatgtggctgcctgccaggcttcccgcagagatttcttgaaaactttcccacaaacgaggctcatcaacccacccatctcacaccaatgcctcctttgtgtgcccagaacatatagtttttatttgctccacatagctcacccctggcacctcccacggcagggaagaggccacaggagaggcagccgtgtgctaggggagcctcaggagggtggggacggggtcggcgaggcgcggccatgcgctggccagtcacccctgtgaggctgcacacactgagctcaggttccttcctccttcagcgcggtgacagtccacatgcccagcttccctaacacggttggcgtagagataagagattcttaaagagcccaatattcatgtagattcggttaggttgtgcagcctttggtgaatttcacagtgacttgtaccaacactggacagacccagagcagtcataagaaagtggcatcacaggtagtactaggaattgcttctcagggggagcaaagaacttaaaaaaattattcctagctcttggccaatttgacatagtggcagctcaaaacacactagttgaactgagttgaatttggacttttagaaaaggtctggaggccaatatggctgactttgtttaatttttttatttttattttttgaggctgagtctcactctgtgacccaggctggagtgcggaggcatgatctcagctcactgtagcctccacctcccaggttcaagtgattctcctgcctcagcctcctgagtagctaggattacaggtgtgcaccaccacgtccagataatttttgtacttttagtagagatggggttttgccacattggccaggttggttttgaactcctgggctgaagtcatctgcttgccttggcctcccaaagtgctggagttacaggtatgagccactccacccagccaaacatggctgactttgattcttggttctatcatctactgtgtgaccttgagcacataatttaatctctttaaggcttggttgcctcatttgcaaaactgatataacagctggagctcccccatgcattgctctgatgagcgcttgcagtgcatgtcataaaatgtccttggtcttggtgcacaattggggcttttgttgttgctgctatcaaaatgtttctaaaactactctggaaacaccttgtgcacaggagtaaggccctatacagttttcatccttccatccacctcccatccatcatttacccgtccacatatccatccatccatccatgcattcactcacccatctactagtccactcatctattcgtccacccatctacccatgtatctactcatccatccatatatcaatttatccatctatccacccatccattcacccagcatctgtccatccatttatctacctatgcatcaatccacccatccatccatccatccatccatccatccatccatccacccactcacccatccacacacccacccacatatccatttatccatccatccatccatccacatatccatttatccatccatccacacatccacccatctgatactcacatagtgccttgagttaggcacagttctaaggatgctcccactaatcctcaccctgacagagtcccgctccccactgcacccctcatccgcagtatggtggagcctatctatgatgaagtgtctcttgtgattgttacctaatggggcaaaaaaaaaaaaaaaaaaaaaaaagattacctggggccctcagacctaatcacaggagcctttaggcagggttttctccactggtggcagaagtggaagtcagagagattctaggctgagaaggatttgaagcgccagggatgccttgaagacagaggggaccatgtgcatgtccagagagtggcccctgggacctgagagtgactcctgccaccactagcaaggatgggggaagtgggcccattctacagtctacagagctgaattctactggcaactgggtgagctggggagtgggttccctcccagagcctctaagaagagcctggccgctgactccttaatgctaggcctggagaccgggagtgcagactccagttgagcctgacccagagacccagagtacagaccccagttgagcctgccctgacttttgacctacaaaactttgagctcataaacctgtttcaagctgtaaaatatgtggtgatttgctacacggcaatagaaaaacagatgcctgcctcccacagtggagcctcccgctgcctctgggagccagggctgcaggtacacaggtggacagaacagtccctgccctcattttgcttgtggattagaagacggaaattaataaaatccagtggtgcgttttatgccctccctgatcgctccttcggagattctcttgctttgcgaccattggctcacccacctggtgcagcccctgcctctccttggtgggctcctgggacttcagcttcggtgggcgacgtcctctttgtaccatttgctccagggcccccgtgcaccattatctcagccctctttattagcttttctccaactgtgtttcctgaagcccgggtgtgctgcatgatgtcaaaagctggtctttgaaaaagcactgctccgtggctaaactgctaggaaagcacttctgtatttcaagactcctcaggggcttcaatgtgcggagccggaggatgcagcatgccccaagtttaccttccatggaagcacagctccccgggcacccagcagccctctgagaacaggctccggggcacaggctgtgtgatgctgctgaaactttgcccaggtttcctctgcttctccaggtggctgcttcttacgcattccgtactcatactcattctaagctggtgatcaacccatggctttcacagtaactgggacccacctgtgtcccgggacgtacacactgcattctaagtgtctctttgcccacatatcaccactgtacgccctttggaatagtttttctctatgattggaatgttgtgtgcccagtagatgtccactaaatatttctgagtaaagaaggctgttaaattttaccaatctatcctgtttttctctttctcagttcaaaatgtgcttcagtcaaagatgcgaaccatctgtccacgtctccattaggaatcagcctttggctgaggaaggccagtgctctccctgtgctaggatgagaaacgtgcatcactcatgcagagctgtctgtgaactgtcttgaccagcaacaacacagcccctgcagacgacgctaatgcaatgccgtgacaccacacgtcacgctgcaggtgaagggggggggaccatgaggctgacttattttcatacaaattaaatacactgctggagctaagtctataatcctatgtttctgagaaaaaatactttacacaaagcaaatggtcatcatattgagggaggggcctttcagaacaaacacgttgccaggaaagactctcctgcaaacattactgcttaagaattctttcaaactcaagggactttaaagcttttttgggtaagaaaacactccttaaaatcattctgctgactgagaacttactaggacaggctcctaggaaatgcagaggcgtttttctcatagagtaaatagaaccgtcagttcttgggtcaaattggaggaaaagtgaaaggaagagaagatgtgactcatgtcatggtcacattttggagacagagctgagcaagtgctggtcacgttttggaggactgagctgagcaagtgctggtcacattttggaggactgagctgagcaagtgctggtcacattttggaggactgagctgagcaagtgctggtcacattttggagactgagctgagcaagtgctggtcacattttggagacagagctgagcaagtgctggtcacattttggaggactgagctgagcaagtgctggtcacattttggaggactgagctgagcaagtgctggtcacattttggagactgagctgagcaagtgctggtcacattttggagacagaactgagcaagtgctgctcacgtttcagaggactgagctgagcaagtgctggtcacattttggaggactgagctgagcaagtgctggtcacattttggaggactgagctgagcaagtgctggtcacattttggagactgagctgagcaagtgctggtcacattttggaggactgagctgagcaagtgctggtcacattttggaggactgagctgagcaagtgctggtcacattttggagactgagctgagcaagtgctggtcacattttggagacagctgagcaagtgctggtcacgtttcagaggactgagctgagcaagtgctggtcacattttggaggactgagctgagcaagtgctggtcacattttggagactgagctgagcaagtgctggtcacattttggagacagagctgagcaagtgctgctcacgttttggaggactgagctgagcaagtgctggtcacattttggaggactgagctgagcaagtgctggtcacgttttggagactgagctgagcaagtgctggtcacattttggagactgagctgagcaagtgctggtcacattttggagactgagctgagcaagtgctggtcacgttttggaggactgagctgagcaagtgctggtcacattttggaggactgagctgagtaagtgctggtcacattttggagacagagctgagtaagtgctggtcacattttggagacagagctgagcaagtgctggtcacattttggagacagagctgagcaagtgctgatcacattttggagacagagctgagcaagtgctggtcacgttttggagacagagctgagcaagtgctggtcacgttttggagactgagctgagcaagtgctggtcacattttggagactgagctgagcaagtgctggtcacgtttcggaggactgagctgagcaagtgctggtcacattttggagacagagctgagcaagtgctggtcacattttggaggactgagctgagcaagcggccagactttatcctccagtgaggtcgggagtatgtccaggtttggggacagagactggccagagccacagagaggtggctggaggggctgtttttagggcattctcagcattgccagcagctctcctcttgaaggtctctgagcaggatctgggggatgattccggagggctgtccagggaaggtggcagaaatgaatccagagtggagagttccaacttccaagctgaccagttttgtgactgagcaggtaattaaaacttagtatttaccagccttcgccttttctcttccatcctctggcttgcaggatgagaggaggaggaagcgtgctcagcctctctgatgaagctgctctgtgcagccgaggcgcctggagtacatcgctgctgggtgacagcaggacggtaccaagtgctggtgacagagacgtggccacatgcagaaagcaggcgacgggcctccgaacaggcctcccgaggtctgcagcgtgttcaccaattatacagaaataatcattttgaaataaatcacactgctgcctttgcaggttatttccatgcaaatgcagagtcgcagtagggaatgataaggcaatcgatattaaaaatccaaccaagacagcaaatcagatgctcaaaagggttcctgtcaataatgacttcagtcagttccagggcccaagatttaacagccagcgactactaagatagaagacttctcaatgaatctgcaaagggatcaatacactgaaagacgaatcacatccacatgcgagccgcatagaaattaagaatttgtgccagaaaccttagcttcaagggatggggaacaacagttcagtttaaaagaaaagaaacatgttggcaaataacagaagatgagggcaagttctgcaataattcagatgcataacaaggactggccacagtgtgaactggcagccctgggttccaggttgcaaagacctttctgatgcactttcatatttggtcctctgccatacatagagtgtatgttactaacccaagtttacacaacagggacccagaagtagtggcccttactcaacagcacgctggcagtagaaaggcaaaccctttgtttgacatcatatttggtgtttctttgctatcatgccgtaactgggtcctgggaatgacaggagcccaagcttgcagacctgtgactatgtttgtccctgtctctcctacatttccagcacctaacccagggcttggcatcaagtacttgctatgtatgggtgcatatatgcatatgcatgtctgtgcatgtatgtttatatatgtatggacatgtgcatatatatatgtatgcatatatgtacacatgtacgcatatcactttcttgatgcaagaattactcatcaattaatatgatgtgtgctcttgttagctttttatgtaatattttaaaacataagatattttaagagtggccagagtttttcatttgtattctgtactgggcagaacaacacgatatcactggttagtatggaggtttgaataatcagtgagaggcgtcttcaaactatgcctcggggccaaatctggcccatatgtttttgtacatctcgaaaggtgagaatatttttttaccttctaaatggttaaaaaagaaaaatagtattttgtgacacatgaaagacataggccattcaatttccagtgtccataagggttcactgaaacacagtcacactcatttgctgatgaaattgtctcggctgcttttgtgcactgatggcaggtgcacaagcagaggctccacagagactgcgtagcctgcaaaacctaaaatatatactgtctggccctttatggagaaagcttgctgacttctgtgatctataaaataatttaaagttctaagaacaggcaggggtgactagttggtgctgccctgatgggatagagtgctgacagttaacgcaacacaactcagaagtcagatttttgtgagcctctaggtgtatgaagccagggtgagagactatttgcactgttgaagctctgaggctagaggggtaaggtggagttaaagtatgcatttggttttaatttcataaatgaaatggatgagaattattttaaaaccagaagatgaatgtaaggtgatggaggaagtcagccctctgggataatttatgtttaattcatacccaagggccaccctagaacacagcaggcatgcaggggagggtgaacagcaccccacatgccaggggacagaggtcaggggagtgtgaacagcatgagcagcctgacctcatctctgcttcctgccagaagaaagttgtttcttagacaaaaacattctgaaatcaggtaggagctgtgaatcaagtggtaggaaggaagaacaggatttgtgatcatttatcactgagaagctagaggaaaatggggaacagaagggaaacgcaggggtggatgcccagcccctgtccggtcacccgaatacagttcttacaactgacaccctcgacagccaggacctctgagtcagggaatgctggtgcggccggctctacagcatgactctacagcatgactgcgcatgcacttggttttcattgttcgtagagtaggaaaattactctggtgattgaggactttattggtacaaaatcacatagaaattataaagccacagttacctaaacgaatatgcacctgccttgacacccacaagtgtctcatacttctttaagaaccaaattttagtctcttctcatattatctttacttttttcttcccttccaattctaaaatatgtttggtaaatgatcaaatacaagtttgtttagaaagaatggtccatcctcttcaaggagaactacaaaccactgctcaatgaaataaaagaggatacaaacaaatggaagaacattccatgctcatgggtaggaagaatcaatatcgtgaaaatggccatactgctcaaggtaatttatagattcaatgccatccccatcaagctaccaatgactttcttcacagaattggaaaaaactactttaaagttcatatggaaccaaaaaagagcccgcattgccaagtcaatcctaggccaaaagaacaaagctggaggcatcatgctacctgacttcaaactatactacaaggctacagtaaccaaaacagcatggtactggtaccacaacagatatgtagaccaatggaacagaacagagccctcagaaataatgccgcgtatctacaactatctgatctttcacaaacctgacaaaaacaagaaatggggaaaggattccctatttaataaatggtgctgggaaaactggctagccatatgtagaaagctgaaattggatcccttccttacaccttatacaaaaattaattcaagatggattaaagacttacatgttagacctaaaaccataaaattcctagaagaaaacctaggcaataccattgaggacataggcatgggcaaggacttcatgtctaaaacaccaaaagcaatggcaacaaaagccaaaactgacaaatgggatctaattaaactaaagagcttctgcacagcaaaagaaactaccatcagagtgaacaggcaacctacagaatgggagaagatttttgcaatctactcatctgagaaagggctagtatccagaatctacaatgaactcaaacaaatttacaagaaaaaaacaaccccatcaaaaaatgggcaaaggatatgaacagacacttctcaaaagaagacatttatgcagccaagagacacatgaaaaaatgctcatcatcactggtcatcagagaaatgcaaatcaaaaccacaatgagataccatctcacaccagttagaatggtgatcattaaaaactcaggaaacaacaggtgctggagaggatgtggagaaataggaacacttttacactgttggtgggactgtaaactagttcaaccattgtggaagtcagtgtggcgattcctcagggatctagaactagaaatgccatttgacccagccatcccattactgggtatatacccaaaggattataaaacatgctgctataaagacacatgcacacctatgtttattgtggcactattcacaatagcaaagacttggaaccaacccgaatgtccaacaatgatagactggatgaagaaaatgtggcacatatacaccatggaatactatgcagccataaaaaatgatgagttcatgtcctttgtggggacatggatgaagctggaaaccatcattctcagcaaactatcacaagcacaaaaaaccaaacaccgcgtgttctcactcataggtgggaattgaacaatgagaacacatggacacaggaaggggaacatcacacactgggacctgttgtggggtggggggaggggggagggatagcattaggagatatacctaatgttaaacgacgagttactgggtgcagcacaccaacatggcacatgtatacatatgtaacaaacctgcacgttgtgcacatgtaccctaagacttaaagtataattaaaaaaaaaaaagaatggtccataaaagacctgcaggaacccccaggagattagtgccacagaccccgcatcatcgatttgtcaccagtgaaaagaggcgcactttctagtcatcacaagaaacaagtcccacctggagctctccaacacagaaatcaaggaaaaccatgaattcacaataaactggaaagaactctcattttctctgaccttttttggaagttttgctgctgaatacatgcatagcctgtattaagaagcgagggcaagggaggtgtgcaggaagtggcatgctctcttatcctttcagacaaaggcacgtgttctgaaaacctggaaaacctcctgttcggtctccccgggggacctgactctcagtctccccaggggatctgactctcagccctgggcaccacgctttgagcccatggcgtgtcccactctgattggcaccctttctcttagctgaaacagagtgtcaggcttaactttcacacttccaaaaacatttgcatgattttgtaaatatccagagaatacttttattatttcttatctgaaaactctagtgagaaaccataaccattaatacgtattctgtattgcgggatagacatgacccccagcttaccacgggaaaaatagcagatacatttcccactgggcattttgtaagggagagagttattttaggtcttttcttggggacagttgcagagctgtacgcagcacttactgtccctggaggtcgcaggaacaatggtgtcaaatgtctagcacagcggccgggccagggcctcacacaatgtctgtttttcagaaacggcatccaacacccagcaagcgcctgcgcagtgcctgcccggtaccagctcgtgttagctactattttttaaggataaaaataacttaaaagctcttcaagtgaggaactattcagtaaaatacttttaaaaagcctcaggcaagaacatgattttccagattaggagaaggtgatataataattagtcaaatgggaagaaaggcgttccaagatatcatttatcaaaatggccttggataactctcttcaacctctttggtgctgagctacttctagatatacatagttttagaaaagaatgcatactaacattaacgttttgagaaaatttatcatgatcacagaatcagatattgcttatattttatagggcctatcagaatgaagaaactgaaatatttcccatctatgcatctagaggaggtagagacttctaaaggttcgttcatgaaaattctaacttaatcacaatgggcacttacaataatctttcacctttttttgcgtgaaccttgaataagttggtaattaaaaaaattatcatacgtagaaagtcaacatctccatgtcatgaaaataaattaataaacagttcttcaaaattgaaatacgattgtctctttaaatctcactgtaacatttttctgtttttatcgcagggacaacatggcagagattcctgtaagtcttgggttatttctgagtgctggttatcgtggcatctgaaaatgtaaataagtgatgtaccctgtggggtagctctgctgcaggcaccccggggacctgctggtgaccctgcccttctcctgctgcgatcatcccaggccagcgtgacactcagcagcgtggacgtctctctgcaaacgcccaaatgcagtgtatgaaatgtcatccctagaaatggcttcatttgggataaagctttgaacttgcgtgcgtgccccgcaccccgtggcggactgagtcactgctttgctgttgcggcgtggtgagtaaaactttcccaggggagccggagttgagtgagaaagggatgcaggacacgcaggagctgacacatctctatggatttaagtcgctgtttccacaaatgctactcacatgcccacacgtgtagggcaggactgtcacgcgtccactctgctcagctttccaggccggatctggtcccagccattctacctgacccagactccccgcacccctgccattcccccagctgccgtcctgtgtctcctgatttctgcgtttttgatcctgaggctctctgcctctctgcctcctccctggaggccgtgcaaatcctgttctccttccagcggtgagttcctcctgctgaccacctcccccgatgccctccacgctgcacactgggctggtctgcagaggtcgaatgcactccctggtgacttacacatctcacaagtgccctccatcacctgcttgtgaactcctgaccacagcagcctactccatgtccccctgtggatgctgcaatgcccagcaccacactggtggctcaaagactgcatgcctgagacggggtccaaacccctcttcaactgtcctccaagcttcaggtccaccgtgacctcccccaactctgctgcagctgccgtggtgccagccccctgcccctctcctccacctccatagatcaggcttcagtgtctggggacctggggactgctgtcctccttcccagcatgaagttctactgcaagggccactctccctgtacaggccttcctgacccctcgtccctggaaagccctctccagggccctcggcctcgctgtctcacatcactcgcctccctaccccacctccctcctcgcacctgggacgcaggtgccctccggtcacacccttccatcccgtgtggtgctgagcccctcacacacacgaggggccccggaatcacctgccacgtgaataaacaaagtcagatctgaaatgcttaaaagcaaattaaacttaactcataaaaggagaagaaaaatgttcatttagaaaagttgtatctgttttctttccaaataaatttacttgtaggaaacagaaatgtctgttctcttaacaacaattgtgaggatgactgtaaggttgttgtctgttgtatcctgtgtgtaagtgtgtgtgactgtgtgagtgtgtaagaaaatgtgagtctgtgagagaacatgagtgtgtgtgtgtaagtgtggtgtgtgagtgtggagtgtgtgagtgttcaagattccctacataacgggatacacacagatgtactgataagcggatagatacgatcttgatgtatgatgatggaggctggtttctctaagtaatcagcctacatgtctgggtttaatctgcttattctttgccattagaaaagggacattatgttggttggagaaaactggtgacaagtggtaaacagagtagctgctgacaacagcaagtggacagaggtctctctgatcaccatgtaaatgttacagcccacccgttaatgcacaactgggtgttaaaccaactgacctgctgccggcagcacctgccggcatcaggtcagggtctctggagcccggctgccagtaaagacacttgcatgcatctccgaattgacccgctgcagcagcacctgcctgcaccaggtcagggcctctggagcctggctgccagcagagacatttgcatgcatctctgaactgacccgctgcagcggcacctgcctgcaccaggtcagggtctctggagcctggctgccagcagagacatttgcatgtgtctccgacaatgtcctaaggaaggcacctgcactgccaacaccgacttctgctgcaaattctgaaaaccctcgaggttagattgttagccaggagtgctcagaatattgaaataaatggactgtgacaaaattccacactgttctgtaatttccatcttctgtagcaaagccatttccaaagttgaaaaattactattgtgaatgtaatctttcatttttattagaaacagcaccgattaacagtgaaattacttaaatcttagcatgtaggcagcacagaaaaaaggagaccaaaacctccacgcaactgacatcctggaaagtggatggtgccttttgtcctgcgggagtgtttcctagcacagccgcgaggtgagtattgggcactaatgcaggttttagaaatccagctacaagactgtggcccagctccatggcaaacatgtcgatggatgtgacatttgttttctggaagacaccaggagggagagcttcattcatgtaatattatatgaactagaaactgaatatataacatacttaataatctagatattcaaattgctggatcaaactttgtctattaactacagacatgaatgttggtatttatgtagctgttaaaatgttgcatagttttactccttggtaacattaaaacctatagagacttcacgtcctgagagtgtcagagatgttggctagatgaggctattactctgcctattctagaacattctcaggcacggaagcttactcccgcattagcaagatacccagttttgtcagatatttgtgctttagaaccctggcccacttttcttcccactttaagtagctattacctgatacacaaacaacttgctccccggaagggaaatccactggcatggttcatccacggcatgaagacagttaggctgaggcacagggagggtgtgttgggcctggttcctcaagcactggttgggcatttgtgtggattgctgcctcctcaaccactgcctccctccaattatcctcctgacaaaccagctgtcttccctgcacctctggtctggcagctgcaggggcaaggccagggccgggccgaccctttcagatgtgcctggggaggctggaggaggtagcgacaggtcccagtcccccggagctataaatgagcattgtggttccacattattccatagtctctccaaagactcggtccttgttcctacggcccacccttccttccagatcagcgggagagggctctggaagacgggagggaaagcttttgttctggtgtaagtactggcttagaggaattaaatttaaagacagataactggactctcaggtttcactgctgatccagtgactgtcaccatcgggaggcagaatctctgatgccaggaaacatcagggcctccatccctcagctgcctgcaagctccacatcttcatggagaggtcaaccaggcagcagagaggatttttacctctggggaatggtgttcgataaacacccaaatgtgaaagatagacatgaaaaggaaagtctaaatgaacaaaccttggagccgaacgtaacagacaaaacaaaggcgaccacggctgggtgcctgcccaagagaaccgcagacctatgtccacgggaaaccctgaacgccaaggctccggcagtaggattcacgacagccaaagggtggcagccacctgaacatccgtgagctgatgcgtggatgaactgacggtgatgtgcacacacgatagaatatcctcctgtcgtaaggaggaatgcagcactagcgtgcgctactccatgatgaacctcaccagcattgtgtgaagtgaaagaagccagccataaaacaccacgcatttacaggaagaatccaggacacgcaaatccacaggcatggaaagtagattcgcagtggccgggggctggggtgagacgtgtcggggaagagaatggagaaggacgtctagtggctccaggtgttcttgctggggtggtgaaaatgttctaaggttagttaacgatggttgcacagttctggggatacactaaaaaccgttaatgtgtacactgaaaatggctgaactctgtggtttgtaaattatctcactaagcttgttaaaacataaaagcaattaaatccattttcattttgctgttttgttgcttcgacacaacttttcaacaaaacagaaaatacatcagaagataaagatggtatactcaatcctatttttaaggcaactgggagaactagagatatatttaatatttaattccaaatgctagcaaatgaactgattatttaccagaacaggccagtgaataaggtatgtattatgcaatcaaggaattagatctattaatcttcagagggaaatcctgtgcagaaatacaatgatatcatagtaccactaagaccaattcaccccaaagctagaaatcaaataattttcaacaatgtgatgattacgcaatgccagtaaaaaataggctaattatcaattttggaattaaacacttaaatgagctaagtgtctgttttgaccccccaaagcatctctcgtttgacgcccttttaatctccactgggaaggccctccttccacacacagcaccccagcaggaagacagctgtaggcagcaggtgggcagtcgtggtacctgctcctatttcctcatctttacccgaaagaggaccttgggcttccagccctagcagcgttctgaggactgtgcagaggtagaaggaaagctgggccattgtcataggaaactgtttcttttatgattaaggatgtggcggtggaaggaagaggtccaactggagaagagaaaaatgaaagctcatcactcatagaccactgtgcgaggccttctattggcatctgactttatgcgtccctaacaatctctgcaggtaggatctttttttttgttggctttttgagatggagtctcgctctgtcgcccaggctggagtgcaatggtgtgatcttggctcactgcaacctccgcctcctgggttaattctcttgtctcagcctcctgagtacctaggattacaggtgcccgccaccacggccggctaatttttgtatttttagttgagacggggtttcaccatgttggtcaggctggtctcgaactcctgacctcaggtgatcctcccaccttggcctcccaaagtgttgggattacaggcgtgagccaccatgcccagccaatctctgtaggttctataatctctattttacagatggaaaaactgaggatcaaagaggtcaaataaaaaaacattaaacacacatggattaagcactagggttgggatttgaacccaggtcaagaataatctctacgagggcagggtttttttttaattttatttatttttttgatatggagtctcgctctgtcacccaggctggagtgcagtggcatggtgtcagctcactgccagctccgcctcccgggttcaggccattctcctgtcccagcctcccgagtagctgggactacaggcacctgccaccacgcccggctaattttttgtatttttagtagagacgaggtttcaccgtgttagcctggatggtctcgatctcttgacctcgtgatccgcccacctcggccttccaaagtgctgggattacaggtgtgagccaccgcacccggccgagggcagggtttttaatctgttttgttcaccgatgtactcctgcctgacgcggtttctggggcataaaaactgttcaataagtatttgtagaataagttttatttcaaaataataaaaagccttgatgcatgatgaagatggaatttgtgttggagaacatgcttatagctgggtctctttcacaccctaatttatagtctgtttcttttggaatttctgcaagtagagagtccaaagctatctgaggtagctgaaatgggacccggaagatttgcctcattggtttgggaggagtattttgcctatttgcatatttcatgctcagatttatttattattaggaaaagagtaagggtcattacataattctgtcgttctagatcattccttttggtcacatgtggatttattttatttactcatcattggatatggataactattttatttttaatttttattttattttattttttttgagatggagtctcgctctgtggcccaggatggagtgtgtggtgcaatctcagctcactgcaacctctgcctcccggattcaagcaattctcctgcctcagcttcccgagtagctgggactacaggtgtccatcacgacacccggctaatttttgtatttttagtagagatggggtttcaccatgttggccaggctggtcttgaactcctgacctcaagtgatctgcctgcctcagcctcccaaagtgctaggattacaggcgtgagccactgcactcacccctaatgatcattttaaactcccaaaacaaaaagcacttttgtaactatggaaacaagtgctattttcattttttacttagtgtagagtttgtcattgctgacgttcttggtagaatgtcaacagcaaggacaaaaattacaagttttctttgagtaatgctattccaaattcttgttcatctcttgacttcaagaaatcacatgtctaaaaatcattcttgttctatggaaacgtttccaaacttgttcagttttgactcatagagacacatttggcaaagcaatgtcttctgctgactgaggcgcttactggagaaaggcagttgcaaaagcagataccaaaactaagtattttaaaataatttttggagataaactaaagctctgaaacacaaaacagcttgctatttatattttaaatgttagattatttgctttttttcctatacaaactttgctgaagcctgtagcttgccacagtattagctgtttacaagggcagttccttcttcattgccataactgagctgtgtgcctcgcaggtactactgactgaaatgttctattaattaatttattatttttgagacggagtcttgctctgtcacctgggctggagtgcaatggcgtgatctcggctcactgcaacctgtgtctcccagattcaagtgattctcctgcctcagcttccccagtagctggaattataggacgtgccatcacgcccagctaatttttgtatttttagtacagatggggtttcaccatactggccaggctgatcttgaactcctgagcttgagtgatctgcccgcctcggactcccaaagtgctgggattacaggcgtgagccaccacaccccaccctattaccttagtattaaggagcatgtcttaatcatctcaagggaaacctcctgccactctctcatcctacccggggcaaattattatggtgtccagttccagtcatggggaccactaattataatatttgcctttggtgtttttggttattaatgaagaccccaggaaaaagaaatggaacatgaagacataattttaaaagtaattttaataaaaatatttaggtaatggtaaacttgaggtaacatagcatgtaagattctattatctaggtgggctcttcctgtcagaggaagaaaggcaggacagccttccggtgtaaattttattattgtgggaaatgattgcattgtagccttgaaataaaaatggcccagatacaaaaagtcaacctcatgaaacgttcccatttcagtgtgcccaaattacgaggttcttacctttcacttgcgggcgaatgacgcgagcatctctcagttgctttgtagctctctaatgataaaattaacctacttaaatggtcacatccactgtttattttaaaatccacccaccactgtcggcctggctcacagtgaattaaccgttcaacagttaaggagagactgcccgacagagcccacctggggctgcttctgggcctctgcactgggctcctccggggagggtgaggtcaggatctaaatgcctctgcagcaaccacaccaaaactgagacccagtgcagaactggggctgaaggacccgattttcactgaactcttatcactaagaagagttgagggttcttccacatgtggaaggagagcttaggaataataattagtaacacctttcctgatacatcaaatttaacaccttccagggagaagaagaaagggcggaatgaatatggaaagcagtggtgtgacagtgatggggttcagtttgatgcgtgaagaccaggggtaggagcgtgagtgggggtgcactttgctaaacctgcatgtaacagtgggcttaattttccctttttttaacaccttgtttcttcaaattacacaatgttgatgctaaaatgttctttgtagaagcgaggcccagctcctgaaggattcatctgagaaacccagggacatgcccttctctcattggaacaagtgggaaaaaaggcatcttaaaaaaaggttatggtgaagccgtgcggcagcactggaagaggatgaggaggctggagaaggcgtgtgagtgcaagctgccctcccgagactgtgccctctgagccagagtcttcctccgatgtgcccaagtccacccgaccaggaacgggggaaggagcggggcgatccaacagccacacaacagagtcccaagttccaatcacaaattcaggctgtgaggtgaaatcacaaatgtgaactttacttatggaaaccaaatagaagtgctttcaaattggggatccaagacccaacagacataagtgatcagcagcatcccgatcgggggggtaagacaaaggggtccttggatgggggcacctgtgagcagggacccctttgtctgagctccccgggtcccgagctggacgcacggctgccccactggccagagcccatcccagctgctatttgtgccattgtaaggtttgtattccctctttgttctgggaagctttcagttgtcccattgtggctgtgatgaccctaagtgactcttagcagtgcatttttatatttgaaggccaggatcgcttaggggtaagtgcacaggaaacaaacttgaagcgaatgcagctatgatttatgagtgtttgtgctcactgtatatcccggcaagctcagaggacctactcagcagtgtcccccacccatccacacgctcacctggaataatcccccacgggaacacagccactatcctcgccttgggatttgtgactcctgatgggaagtaccctgccagcccagcaacaccgggcctgagtccccgagcccccactcctctccactcagcaggggccccctcacgccatgtataccccccgggtggacttcaggggcgctgtccctgtgggcgctgtgcccttgccgtcctaacctactccctcctgtggagccactggcaaggttttggggaacatgggtgtgagtccacgctagacctcagctgcctgccctggatcatttgaaaaaggggaacttttagtttcctgctaaatagaaggccccaaaagaagccaaccaatgccgtgtccccgtgataggccagcgtggctgtcccagaagcagagaggggaacagcacaggctcgcatgtctccagggagctcaacaccagatggcttagtgataggagccctggctgagggtggccgcatctgcagtgacatggctgcttcccacttccctgcacctgtcctcatggtggctgcttcaggggaggggtgggcaggggccccactgcaggtccagccaaggggcacacagaagctggacatttgcacactcagctgggtcgggactgagctccgtcctcagcccctgcagccaagacgccagtgtcagccggtatgctccgctacgggggctggctgtggtttcagagtctcaccctaattccaaagaacaaaagcatctctcgagttccagggacattttgtcagttggaacagcatttctatagtgtgcaccccacatgctatgtgcacacatcacaaagcacacacgggtactcttacacacacacactctgatgcacgagctgcgggcacttctgtgcatcacttgctgagctgtagcatagaggcagaattccttacagggaagagttcaggcctcaggcacactgtctgctggcattttatgtggaacactgccatgtgcaaatgaagtctttgagacaggagaggagagagcagcagggacgaggggtgtcccacctgtcactcagtcatccagcaaatattgatgaagctcgtcccatgagccgggcctgcgtctaggtgctgggatatctcagcgaacaaaacagacagatgtccctgccttcatggggctcactttccatccggagtcggggctcggacaataaacaacataatcagggactgtgacagaggtgactgtactgccccactctgcatccttcttcctcttggccccctcctcgaggtggggccacatgatgcttctggccatcagaacttgagtggacgcgatgactgcccctcggcctggtctgcagggtgcttggcccttgggctgtcctcccggtccctccccgccctgccctccgatggcagagactctatgtggaagccacaggactctcccaggcacactggatggagagccgcctggccctcgctgagctatgatgtgagtggacatcaccttgagcctcagagatttaggagttcctctggcaggcctgcagagcccacctgcgctgacacagctgcacttctaagtgggagatgtcaacgagaagggacatggagcgaagagctcacccccggatatctgggcaagagacttaaggaggagggcagagcttgtgcttcagccacacccaggaggctgcgggagggaggggccgcaggagatgtggttggagaggcccctggggaacaggtggaggggatttgagcagggagcgaggtgctcagcagctagctggcagggagaaccaacagggatggatcaggatggaggctgggacccacttaatcacccaggtgggcagaggagggcttgggccttggtgatgggagaggtgcttgctaagtatcagagcttccctgggtccttggcacaatcagccatcagtgctctcagcaaagacatagaaatagtgctcctcattttgtacctggataaggggagagctcaagttccaatccctgttagcggcgggtgacacaaccatgcacacatctcaaattccaattcctgttagcggcgggtgacgtcaccatgcacacatctcaagttccagttcctgttagcggtgggtaatgtcaccatgcacacatcctgttttctcctgctctgccactgtgatctccagatgatcaatttcatattatcaggaaaatgacctttggcacagaaagcccagaggagaaggtgagggacttgcatgcacgcacacatttaaatgtcaacattctatggaattcagtatcataaaggtatgcaaaccatgggaagtaatcatgagtttgctctgggaggccccgcagttagaagggaaccttctgggcacgcacatcgtggatggagacagaggaacggcagcgccgcctgctgctgctgggccctgcgtgtctgtaccaccttctgtggtagagaaaacagcaggcggctttgctgcaaactccagcacagcctctgtgtgggaggagcagggtcagcagaaacccagaggcaggaaggagctgagctgagctggtgcaagagtgtcctgccctgggaggaagtggctttgtaccaactgataaaatgcccagagtagggggcacataactgtaaacttctagaacccacatcctcaaagcccaacccctgacccaggaggtgcatgggtggctgttccctcccagcccagtgccacctctgccatcctccctggctgggaaagatgaactgcgcttaaaatgggctcagttttctttttcctttctttccttcctttccttccattccttccctttctttccctttcttttcatccttccttccttttctttctctttctttctctctctctctctctttctttctctttttttaacctagtaattgcttttcacatctgctggtgggctgctatctttcataggataacttccattattgctttaaataaggtggtgtttggcctctgttttgttttcaggtaaagcaaactgcaatcaggaagccctcattacagacagtgaggtcatgacaagaaaagttcattcacactggagagttcaaccccattggaaatgtctttccaaacacagctggtgactttgcaaacccagacattcccagaaactcagtggttctagaaacttgcttggaataattaaggttttagagcagctgttggaatttttagaaaggaaaaaaagaaaaaacgaagtgaggctccccctccccgactcctcttacacatccctgtggctctgtggtgtcacggctgagcgtgctgcgctccactgaccgtgtggatgaagggcaggcagcacctgggtgcatttgtgccagcgcatggcagtgaggccgctggcagtgcatttcctgttatccgtgaccccgtgcgcccggggctgggtctgcagaggctttggggaacacactgttgctgtctcctgtgcctggcccggtgtccatgtggctcacaggacccatagggaccaggtgctgctctaaactggaggcatgaactgaccattggcccagacagccttgccattcccgtccgggggattaaaccttgaacaggttttgtaggactctcagccccaacttccttgtctctagaaaacttgccactatgaattatttctccgtccctttgagacatcggccctttcctggcctcttgctcagttcactgcccagctttgtcttctcgaaggacccaggagcctttgaaatgtaaccaacaaggaagataacaccctcagctcccagtccctgcgggaggcaggggcctaactgtggtaagcgctaatctgcaaacattgctggcctgactgcaccaaccggcctccatccgatgtcctccaggactctcccaccagctcaccccagtgcttaaaaaccctcccgcctttcgtttcagcagggtggagttcagctcgctctctcctactgcaatagtctgggatacgtcttccctgcctgtctcactctccctggggtaacttttctttgacaccactgagtcctcccagcaacctgcagctgagcacacaacccccctctgcacaggggaaccgagtccacagtcctaactaccaaatgacatggcctcactaaagtaactcctagaagccgagacctttgtccgacagctctcaggagaggctgccgaggagaaccggcttcccacgtgccctgaccacgcccacacccacggcgtgagatttcaccactcagccgctgagaagcagggggtctttggcccaaaacaaacatcctctgagacgggaaggaggcatgtcccccaagaactgcctgggtactacaatgaagcagggtaaatattcagaagtgtgtttgggtttttaatgatataaagtatcattaacattcacttcaacgcacagaggagaagtaactgttacagtgtttgttttcacatctgtcagacagacatgagaactgccctgcccctcaaggaaccagctgcggtctccctggctggctgggagcactgggctccgatcctgctcctgagtgtctgcctggcagctgcaccctcatctgacatgcaaggcggggtcagacaagataatctgaatattccttcatcccccaacttgtgattttgtttctatgatttatacccagcccaaagatgctatttcacaaaatgggttttgtggcttgtctagacaggaatacaaggcctcaggcagccacggaatcacaattagcgatccattcacactagcaccgaatattcccacggaaaggccgtgcagtgattatctctaaggacaaggactgtgtgtgaagaaggacaaggagagaggagctcccgcgactgccaggtccaaatggaattttacatcggaaatgacagctacttactaaagtcttgtagcttagtttactaacctggatgcattaaatacacacatcatttgaaaaatagcatctcaaaaaatgattttctcatagccgtttcttggaaacaaatttaaacaaagatgcaatgatttaaaaaaccgctacacgaaaattctgaagggggacacctgaggaaggcggggagtgttttttttttttttttttttgagacggagtctcgctctgttgcccaggctggagtgcagtggtgcgatctcggctcactgcaagctccgcctcccgggttcacgccattctcctgcctcagcctcccgagtagctgggactacaggcgcccgccactacgcccggctaattttttgtatttttttttttaatagagacggggtttcaccgtgttagccaggatggtgtcgatctcctgacctcgtgttccgcccgcctcggcctcccaaagtgctgggattacaggcgtgagcggggagtgttttttaagttcggcagaggacacccagggctgcaccggctcttcagggaccctccggggagaagaggcatcccctccccagccctggacgtccacctcaggggcggtggggatgcggggatgcggggatgccgagcgctcccaggctgggtcacagcaggcagtggctccgctctggcttcgactctcaggacccacctgggacccctgctccacgctgcggggaggccaaacctggagaacccagggcaccagttcaggctgacagcccggccggacccagccaacgccccgcacagctcgccagccacgggagggagcggcctccggcagaccccagccccaggcacgaccccaggcccgggcacgaccccagcccccaccggctgatgcgacgcccacaggggacgagctgttccagcaccacccccgcccccgcgtgcagaatcctgagcaacagaaacagcactttaagaaacgaaatcgtggacgcacttggaacacggccgcagtgactggaatggtgcccagagccattttaatctggaacagactggggaccaagtctcaagctccaggcctgtggggtcaagcagcttattccgtggagggaggaaagtcgcaggggacctggaggccctggagatgggggctcctcggccggccgactgcagcctggagaaggccactgccaggcctttagtttccagagacgctgcagttcaacattttccggggaaagtttaccgtttccaaatgtcatcaaaattaaaagaaaacacctccaccatatggacataacgagacctgcctgagggccaccacatccagccctagcccaccaacttacaaccccctgaggctgccccaagatggaagcgtgctggggaaataggcatattcagccacgggaagggcagttcgccagcacgagttcggggaaaataatttagccgtctcacttactttgactgaagcctattaaaacaattaaaagaaagaaaaaaccctactgaaatcaaagtgccaactgtagcatggtttctagtagcaaacttgagacaaccaaaatgaaaagcaatagaggaatgatattactgttcaatcatatggaatattaaggagctattttaaaaggataatacaggatcgctaaacagcctagaaaaatgttgttggttgaaagatcagaattcaaaatggaaaatgggacagttatgtcaggtagttgaattattttttagttcatcaattaatcccattaattaattttaattattaattcaatttgctgctttattaattataatgaatttaaattataataatttaattttataaagtagtcactaattatttataattaatttaattctaatgataataatttaaccttaattacattattaaaattaaaattaattaatttttatctaattaatcaaatttgacatatgtgtaacactataaataaatatatttttgcttaaaaaatcaggggaatattattacaagtaaaaatacaccaagatgcaaaagcagacatggatcttgagaagccatttggtatgtccacttcagtgctaagtgcttccacctggtggccaattcaaataaaaataggggccagcacagataagagatgcaccgccttcaagaggcttgcatttgtggaagaaaaaacacaccaagtatgcaaatgcaataaccaaaaggccaatgtgaaggacatgaaataaggcagtgggataaagaagtgtggcatgggagacaggcgggcttcttggttagatatgacaggaacagcctcttagaaaagtgatgtaaagtaaaaataaaggccctagccctccaggcaagacggaatagactctttgtggcaataagatagcaaattatgggctgggcgtggtggctcatgcctgtaatccagcactttgggaggctgaggccctcgttccatgtccttctatgttaaaccatcccccaaatggtgtgaagtccccagaatggctggccccgccatttctctattttgttttctctaacctcctgccctctctcttccacctccagtatatggcacggcacattggaggtgctcaaaaatgatttaataaatgaatggagaaagcacataggcaggacatcctagtaccaatgatgaatgagtgtttatggcagatgtgacccaggtcctcagaggcacatgaaaaatgctaatgaacggcagcactcattattcactgtatgaacgtggcttcaagcagtagagatgttaaagcatcctgtaatggagtataactgttttctctctctctccttttttttttttttttttttatgaggcggagttttgctcttgttgcccaggctggagtgcagtggtgtgatctcagctcactgcaacctctgcctcctgggttcaaggaattctgcctcagccttccaagtagccaggattacaggtgtgcactactacatccagctaattttgtattttttggtagagatgtggtttccccgtgttggtcaggctggtctcgaactcctggcctcaggtgatccacctgcctcagcctcccaaagtgctgggattataggcatgagccatcatacccggccaaattgttctctcaatgggcccttgcaacaattcttgagggtcaataggaaaccctgttttctggaggaggaaacaggcacagagagatgaagtcgcacccccagttgcattgagagttgatggcagagccaatggtcacacctgcctgtttcccaggtggagtctgtcttctcttgaggctgccgctgaccctcaatggaacacaggcacgcagtgcctcagcaaccagccgctcagaactcctcctgggcctttctcagagcctgggacctggaactttgtgctatgaaatgcctatcaaagtcctggctctgggaagggaccccaagttcttgtaattctgtctgtggatcatagcaggtcctctgatggctagacacagggatcataggctcttggcttgcaatgcggaagattcatgttgcaccactggcccttactgaattctattacaataaataactatacaaaactaatctccacatgtgctataaaaataccttgaggtcgttgactaccatgtgactctttgtctgtgataaaaatttaagcaggaaaaattcttagtatttgttaaacaaagctctgtatgcttcaaaaaatgtctgcagtcttctctctgaaaatactagccaatgtttactgagtactgtgaggagatgggagagtcccacacgtgcacatgtgttgtttcttactcacaggtcattttatgattacccctacttacgtatggggaaaccaagacacaaacagaggagttcattgctaaaagcacacagctaaaaggtggtagggctctaccacctgctgtgtaaaatgagagacttcaggctggccggggtccccttccacttgggcagctgggcagctcagagtgaaacgggcggctccctgcagccattgtcacatggttgatgtgtttgtggtcttccttcacttcatctagacttctcaattttatttacattttactgtttcctggtgttttttcctactgtcagctaactcaagctttataaaataaagaagagtgaaaacacgcacacaccaatatatgtacttaaatgtttctgggatgaatactttttaaataaacattaaacacagatatttctatctccattgtctgagcaatgaagttgtgaatgttttcctcatgactcttcatgggggtttgcccttacatgctgtgcacacaggacttggccctgtgaagtggacgcagtgaacacagacgcgggctggtgacgttttcacggtaggacatccatcctctgtggcacatgtggagtgaactagcttacacatgacacggagtccacatccctccagccctgtctttgagatgcctgtcctggctgagaggaaccacagtcagtcaccggggcagtagtgccctcttttggccactcctctcctcccttagtataatttagggagacctaagacttcgctcacctcaactgaattgcctgcctttagtttagccccacgattagtcaactctggcgggagaagaggtggagactgactcctgccttccttcccgcctggtttctaaggaggaggacagtgtgtgcactacctgtgggtgtgtgggtcagaaaacgcttagcagcaactggtctactgaaaaatggcctgcttccccaaagcttggacaacgcccagttctctaggttgtcgtgccttagagtgttttcttcctccttttgtaactaggcaaaacagtcttaagcataaccagaaagctgtcgaaaaaaaaaaaacaaatcacagaagatatttgaaagtgtgctctaacgagttatttacttagattgaaaacaatcctttggtgagatttttaccagaacatgaagggcaaataaaacttcaaagtggattgctaagagaatgactggctttggccttcacagagacgaggaggaaggctgcgtggttttagttgtctgtttgtggttttgagcactcaatgtgtgaaccatagcaatagcacctgtgccagagtcagcacctggcacaaacttctcaatgcgccaatcagtcttaactcggggactctcttatcagctgaaatacaacactattgcctttcgacgttcacagagatcttaggtatgcgtgtcctgcagagtggttagctaaggatgatggctttctgcccatttctcacattcctcgctcattcttctgatgcgtggatgaaacggctgccaagaacctagagatgaccatcacacgatcacggtgacttgtgctcacgggacatcaggaatggtttcccaacgtactgatgggatttactatcatgtcaaggaaagaccttttcctaaagtaggtgggagctgctgctctcatttagagtcactttatacattacaattttaaaagaaattgcatatatgcctccaaggttatacagccaagactaatagccaagattattttagtttcttttccttcagcactctgcgcctttagagtagagttctgtgtgccccaggaaagggtcaggcatgggaaattattaaggtcaatagcaaaagccccacagttcaacaggcccttccaggtcggcatcacttgggattgttgctgctaaataatgcgtgcagaggcctcctgggccagcctcccctagggtggatgaaatgaggatgcctggaccacaagctcctcccacttcccccttggttttgactcaacctgaatcaggcatcagctgcaaaggcctgaaggtgactcttgagaactgcttcctcggcacactcacgggcagaaaggcttggaatgtgggagctaagttcattcggcagatatgcgagccttgctccggtgtccaaggacctgggaacacctcagtaaacacaacaggcagaagtattgctcttcctatcaaaacacaacccacgtttgtgaaatgatggaaatattctgcatttccatcatttccagtagttttcacattcaatcctaggtaataactctctaaactcagtatctcttggaaaagattaaggagggctgcgtttggaagggcttcaggaatgatatcatcttgatagcgtaaggaaagggctaagtatagaagacctttttatgttatattgtatccatgctgtatatatacctatacatatgtgtgtgtgtgtgtgtgtgtgtgtgtatgtgtgtatttgatggtaacagaaccgctgccatcgttacgaataatctcaaaagcaattagctaggggaataatgataaagatgatgtttgcttaaaaaaacagtaggcttagccaaaatcattctagaactcacttttatttatgtgtaaaacctaaatttggacatttgtcttcgtgcttttctattacgtctttatatatgtagctgaaatgtatgagtaaagagatcatctaaatgaatttttattctagagttttataggcagatttattcttaaaaccatcaaggctgggacatcccattcaaactcatagattgtctattctacgaaaccctaagtgttctccagagtgcacgctgctgctcctagtcatggacgcggctgccttcaactccttcctcttcttcctctgccactgaggatggaaaccccagtacctgaaggcggtgagttatgctcagacatgcctccaagaaaattcctataaagagcataataaagtatgcagaaatcagcagagcactgagtcccttttgcacttgcctatctcctttctagtaaaggagtcctcattgctttcagtctctgggcctttgagttatgttgattttcatggacgcttaagatattgaaacagtcggtagcactaaatctgttttatgtgtgtttgctcaagaaggatggaattgtagaaaagaaaggacttttgaaaaagagcaagttaatcacgaacaaaaaaaatcggcataaattatcttgtctaacagctgaaatataaagaaaggcctttccataaataagcaaagatcatgctagggaatgtggccaggaagcctgtttgccttgaatgttgtctgtaacctacagggtggcctgatcttggggaaagggatgcgtattttagtagccacaaaatcactcctttttccttcgacctatagtgagttctcaggatctgagcacatttcattccaccccttttcctctttgctttaggaatagatgaagaaaatcaaagagctgtgcacagcagaatagaactgctttgaggacctgcatagccctgtggtcttgggcaagtcactgagcctcagtgtcatgatgggacgagtggatccaacctcattaatgtaaacctcaaatgagaacatggtcagtcactcataggggaagcagaaacaaagatgaatgctaagattatatcttggttcattttctattgctataactgaatacctgagactggataatttataaagaaaataaatttattccttacagttcttgaggctggaaagtcccagggcatggcactggcatctgctcagcttctggtgagtgtgccatgacgtggtgggtggcatcgcatggtgacacagattaagagttggctcaggcctctcttcctctccttacaaagccactggtctcatcaggggccccaccccaatgacctgatgactaggtctctgctcctagttacatcccaaaggccccacgtccaattaacatagaaatttagggggttaagcttccaacacacgaaatgtaggggacacattcaatccacaaaaatatgtaaaggcaatttatattcaataaggcaatacaaaaaagtaaaattctgaagacaacagttatttcccaatgccttctgagtcactctttgtggttaagataaacaccgtggtatccaggctttggtgcaatttcatttcctcattagctattttttacaaacactgctaggcttcccgatgctcacacagggctggacaaacagacgatcagagaaacaccatacagtgagcctgggaaatgctgaatgtctatgtgtgcaacaaggcatgcgagcaaaaacaaaaccgagatgggaagggattgcaggaggggaggaaggggctgtatctgccacgtatctacacagccgacattttaattttttttagacagcgtcttgctctgttgcccagcctggagtgcagtggagcaatcatagctcactgcagcctcgacctcctgggcccaagtgatcctctcacttcagcctcccaagtatctggggccacgggtgcatgccaccacacctggctaatttatttattttattttttgtagagacgaggtctcattgtgttgcccgggctggtcttgagctcctgggctcaagcgatcctcttgcatagaccccatgaagtgtgcgattacagacatgaagcaatgatcccagcctctatgttttagtaatgagtacagacagatccatggatcacccatgcaataaaaaaatcaaaggcttccccgagtgagagtgcaggtgcacgctgtcaccatgtggcgccatgttgccgatatctgcgtcacctaccgaacacttcgttgtcctctgaggttgtccgtgaaagttcacccaggtttctctttttttcagattctcctctgttagtttcactattctggaaaaagaaaacacaacaaacccttttcttaagataaattgttttatcaacaaaataattgtaatgcatttgtctctttataaattttttatcagataatcagtttcacatctgttttcaagatagaatatagagccttggttcagaggagggttttctgcgcaggattcggaattctggcttgttttctctgcctaagcacctaagcactttctggacccagttggtatagttttatacaaaaaaattggaatatcagcctaggtaaaataaattagctacatgccatcccatttattccaagggtgagcccacatagttactgctttagattctaagtgacactgtgcggcagaactgacgccaggccttactcctccaatgacacctttggctaactggaaccagtcaggaccactttgatgggagaatgagtccttttagggacagaaaacgaagctgatgtccggaggcacttttgcattccaggggaggaagcggcctgttgtggtgttatggggtgggccaggccccctggccactcctctgggaatcttcggcttcagagtttctcctctgggcctccctttgcctgtcgtttggggcccgaatggcagtgtgagcttgtttttcgagtttaaagttttcagtacatagtttgatcaccagtgcagagagaagacatggttcagcttcctgatatatttgtaatcaattttacttaactattttgaaatgtcacacttgcacattgaatgattcaaatgctctagaaagtgcacagtggctgcgtgctgaaaccccggggtctcctggatgcccccccgcccccttctgggaggcagctggcatttccagctccttccagactttgcacaatcatctgggcaccttcagacaatgacacatgggtattcttttccctcctttctgtcttcacataaatggcatcacactgtggatgatatgctccttcttgcttttgccagggaaagagggatcctggaggtgacgtcatgtcggcacgcacagactgcttgcacagcccgctagcatttcagttactgttcacacctcaccaggctccacaaccaccatccagcttgttcacatttgtgtttttcaaccctaaccgtgttgcactaatttcctgttcacttctcagaatgcacatggccaaggagtatttctggaggaggaatgagtcacactggagctttcactgagcgggcgtcagtgctgtgggcagccgcgctggccctggtgctacccaccagcagcaccgggaggctgcttctctcgggtgccactccctgcagcgccccaccctggtctctgcacttaagtttgtaccaattttccacccaatctctcatttcctgggagcctttaacccaggaccataatatgtacatagtctcaattttacattcttttccttctggagagaggggcaggcacagccattaagaccaccctgaagtctgattcagacctagtgtgactcacttatgtactgcaggctgtttgttcctggagagaagtccagccctctgagctcacaccagccagggccctacactccgcctcctggtcactaagagccctatctggaaaccctccatcccgtgtgtgtgtgtgtgtgtgtgtttgtgtgtgtgtgtatccattcccatccctgggcagacaggaggggatgggtgggtaaggtccccaccaaccaatgtttacggcattgtttctacaattcaatgctgtctggtgtgattaacagataaaaaacacacgggttattggactcacaaaattgaggagggaagaatttgccttcacgttgtgaaattaaattgataagaggacactggtttggactgagctcctgcactgggcccagcagacgcccccgtatgaagtatggtaccaagcccaaatgaagatctttatttgaccttctgagcaatcaggagaggtaacagcccaacttccaagcaggccaggtttagcccagatgacgaggaagtcccgtctgctttaacctttatggggaagtcatcttggaaccaccacacatccgcctgcattttgttctctgtgtctgctttcctcagtctgtttataaaccaacctcctctgctcggctcattggagcactcattctgttttgcagaaagaggtgttgcctgattctagaatgacaaatagcagccaattaaggtgttcacatttgttgtaactttgtgtacacctgccaggcttctgttgctggttggccgctgtagaaaccaagctgctgctttccagattgcgagtcacagagtcccacgaaacagttactaataagcaatgaaatgcagagaatgttcaaactcactagtaatcagagaaatacagagcgaaacaaaaatgagatttctttttaacacaagtagaaaacaaactgatgtctggcattgctagagatgtggtgggagggaaactttcctgggactggaataaacactctcagcctctttgggaggacaaagagcagcagccgccaccacggagctgagccttgggggcctcacctcggggactctgacctcacctcggggcctctgacctcacccccatggcttccaggctcccagcagcctgtgacttctgcggattttcctgtgtctctattacagaaactcccagaacagtccattgttttattcccctccctgtgatgcggtgaatactgtgagaacaagaacagtgccttacacaccttcccaaccctcaggcctagcacagtgcctggcgcccagagagagctttttaaacatagttaaaatggattgtttctgtttcagcagagggagccaaagatagctggctatgtacacttttcatatctatccagttaatttcagaagacactaaaacttggaaaataaataatttcccgatagtctttcctcagctaggaattcatgtcatatttttttacatcctgcttctatgctaataggagatcatattcttcactaattacaaaataataagtgttatttaagaactaattaagtacgattcagctaccgtcgttattgatcatagatgcattttcttcatgcttaatgtctctccaagcgggacaccactaggaccagtagtgtcctcccattggcgtgggaagcccttctcaccggagagtagaacaatgccgcatcttagaaatgaggcgtttcagatgcagagtgaaagctgatctttaaatcacagcactttgctttaagtgcgtggcgggggataacctagcggcagccacttccctgtatccacttcccaggctggtttcgagggtgggggcagcataagcatgaggaggaattttgtgtcctgtgcgccagcttgtgcacacgttggtcccacagctatggtgcgtccactctgtttatccctcacaccaaagcggccacaggtggaccctgaatagtgatggcagacaggactccaaatccgcctttttctccaccttctcaactcagttctctgatggttcaacatctctaggtcatacagggacacaggacgcgtgcagaaagtacatacgggcctgggaaatttcatgactaatttctactcaaatataaggtttgtttttgagacccgatattgctattccaaaaatataaaatattcccctatgatgaacacatttcctgtaagcaaaaggtctactcgcaaaacaaataatgcagatgatgtgtcaaaagtgaggtgattttcgtgatgataaaacaagagcttcctgcagacggggctcagacttacgagaggggatgggtcctggcagctcaggccctccctgcgtcattgcccaaaagagtccaaatctgagtccaaacggaacctgtgactgcacgtgtcgacacgcatttcaagcaagggtgcctccttcatactatttgtagcaattttctttttcatcagcctaaatatgtgggagctgacctatgtaagaatctgtttcttatccataacaattttagaaggtgtgtgggaatttgctgcagaagccccaggaagggaacacattcccctatatcgtaaggagcacaaacagctcgggacattaccacgtatggtgaaagatgacagagaaaaaagtgtatttttttggaacaaaagaaatgatagtctcctgatctattataaaccagtgattagtctcattttctctgtgtgtaaaaacacaaaaactaaaaaccctctacccagccttgacctctaacccttaagtgtcaagctttccctgggggtcagtgtggccctgcacggggctctggggcaggtgacaggaggggccctgggaactcgagaggtccaccctctcccgccactgaattgtggaagcgcaattcagttttcttcatcagaaccgagtggagaagcaaaggatggcatggagtcaaacttcccaaagccagtcacagccaggacgtcggcgggcggaatcctggttggttttgaggaccccgctcaggtgcttgttcccgcgtagctggagtgtccagccaagtgtgagagatctcctacctggtacagctattcatgtacgtgcacacatggcacacacgcacacgcacattgtaggtgaaaatacgcttataattagccttacatttttaaaagattggtggtctggaggtggcaatttcaggaggaatggcccagagggtaagtttctaatcatcacaaaaaaggctgtgagagaggaaaacacttgcttcgtattggtacaaacattatacagcatattcttaaagtcctgattcagactagaaactgcttatcaggagaggaaggtgttgaaacatgttacaaagtgactctcacctgcaaaaccagttgtatgttagactcggagtcatggtccaccacaggctgctgtattcaacacatgtaagagttgattttgagaatttttcaatcccttaaaaaatgctgcatttcccttaaaaaatgctgcattaggagatgtcctaagcttgtccagcccatcttattttgttgttgctcttctgttttgttttgttttaggcttttagcaacctgaagccatggtttttagtttctgtctctagtgataaccagaacagaaagatgaggaagggtctttactgacccaaccagggacagaaactaagaatccatgactgtattctctccttggacacttgaagccttgagtggagaatcactggcctggaagcagataaaagtcttgtctggttctgcatcctcagtaccttgccactcacccacttgttcccacccatgcttgcaccaaaccctgctcaggagctgagcatacaaagaaaataaggtaggaagccaaattgggtgcttcaaaaataaagctagagaagcaagcccagaatgtcagatggcgactgtccaattaaactcggtgagccaagccctgtccatcacactggagagtgtcaatggcgtaggaagtgcaccgtgtttattttttctgagatttcccagaagaaaaattacagtgattcatatttctaaaattcctaggatgtttaacaagagaagttgcaactgtcttcccccttctgaatcttatactcgactgaccttatttaaaaaacaaaacaaacaaaaaagcccagctgaagcttcctatgacgtcacaggcgacacagtcatatgtggcacctacatgccagctgcttggcctttgaaggctcaggatcctgccggcgtacacacccctccgcctcccctcccctcctgcctcataattcttatctcatttctatgcacaaatctgaatatggcctggtgtttctcacagcaccacacatattttgagccttaggtcatttcagaggggatgctactaaaaggcagatatttctttaagttttctttaccttctgccatattccctgccgtagacagatctaattcacccagatatttgcagaaaatagtttgggggcatcaggatctgcaacacatgtacgtcgtatcaaaatcattattcgcatgacagccaagacctcgggctctctgaagctgattgcctgggtaacagggaaaataactgagttttctgtacctgtttgctcagctttaaaatgaacattataatcatacttttctatgtggtcatcgtgaagagcattcaataagtggaaactgctctttgcagaagcacacaaaactattgaaaatgcagatcagtagcatcttagcttcacactgttatcagaataagcccttattttttctcagaaccatcaaagccacttctcaggggctctggcccaggactcctggtgtggcagcagaaacagtgggatgtagtgccgcccgcagcgcagttactcaaagtgagatcttaagcgagtcaagctccctccacctcagtatccccaggaggacagtggtccccatcttgcggcatcattatgaggactgcaaatggcacatttctctggaggaaagctcactgcttttaggacgcctggcctgttcagccattgtcagcaatggtcaaccctccttgctggcagcaacgtgttctttctgaatcttcgcccactgccattgccctgtcttagattcctctccaattaatccacaccagagatttctaggatttctaatgaaactttagttgacaatgaatacttccaaatactttgtcaggatccagcatctgttcagcaaatttcatttccaatccagaaagtcaaagatatcaggtagaggttaactggcttatttttcatcttacatatttttgctctctttaaatttttataagtattttatatgtatatatataaaaagactagattataaaaggaatttcagcatcatctagttttacaaagagggtcaacactaggctcatgttaagaacagtggcacatttgagattttatctacccgaaagctaagttttgtggatgctcatgaaggaatgagattcctgggtcagagacaaagggtgggttattattcacagcagtagcaacatttcaccattttgacatgagttccctaatacccagttcacacaggagccatgcgaatgggcccaggtggctgtctgcatgcagtgggttgagtggcaggagaggaatgcccatctaggaaacctgaatcctttagaactgtcagtagctacgccagtgccctgctccgcagggagacactatatctcccaagacctgttatttgctgcagatagacactctctctatcttcctagcctgttcattatgtaaacatcctggaaaaaatagtccagaatacgggtggatcctgcctggcttgcaggacatgcagacctgtggaaggttatctcccagcaactggttatgtaagaggtgacctgctgaaaactaacaactgctcttcagccagctcgatgggtgtattctcttgccttccgccagttcacagccaaacccaacttcacacattttattctcaagctaaaagatcaccatgatatctgttactttagatgtacttatcggaaacgaaatgagatagactttcacaattagaaagactttagagaccagcccaaccactcttctcaccactaaggccaggagtagtgatgctgacttgtgcacactcacagggtccttagctcagagatgagactgaaaccttgggcaaatgcacagaaagggttgcttctgatctgaacacaggtctgaggatttcgcagcccctcagtctgggggtccttggaggtagacagtgcccacgtgggggcttcaatttttctgtttctcccacttttaggcttagctgcttctggaaagggccatgagacttgtgctgatggtggggtcagaagacaatgggttcagtgagcccgggtctccccaagggggttcagtgagccccggtctcaagggggttcagtgagcccgggtctcaagggggttcagtgagcctgggtctcaagggaaatggatagatttctaagttaacttctccaagggagtcagagacttcagggttgaggtcatatgtatcacactttcgtaggattctttttctttggtcaagacaacaggactataagcctgtgatatggaaaggccataagaatttggcagcaagctacaaggagaactaggcttcagtgtctggcccccatccaggcctgggaggaggagatgctcggggaacatggcgagagtggtggggtcaaaggaaaacaaatgggggccactgtgggaaggaaagggaagccaggcacagctggggcggaaccaaagtccacgatttcatgggaaatcgattcccagacacagcctgcattcctcaacctcagttcagtgcagaacgcccttataattgcataactgttggagtaccattggcaccactggcagtgcctgcctaggtggtctctgtctaatatgcagtgcaaatgaacagccagtaagaaacattcatgtaaagatcacagcaactaaatagaaaattacagacaaaagttttaatttacctgtaatcagtttactagatcatgtttacattatccacatgttctaggcaatactatcttggatttaaaaaaactgtgggtgtttaaagaggatactgcaggaaaaacaaacctctaaataaataaaagcctatctgatagagcttctgagatctcaatccctcctctccaagatccagaatggaggagaaagggcttctgtcacggcaggtggaatcactgaagtatctactctcttgccctttttgtctggaagcttctcccagggatggaatcactttctggagatgcagtttctgcatcaaatagggtgcatttattaattacctttgagcaaaatgagtgaatttttgcacaaaccattaaactatgtttttgttatagctaacattaaaatggaattgataagagaaaacactcttactcctcttaaaagtataatgaaatgtgtaatacatttagccatccatcaaaacgcccatcacacacattgctggcctagagaacgcctgacacgtccagacggcagcgagaaggtgggtcctctgtcccctccaggagcagcgggctgaaggtggagtggcgctgaagctcccagggtgggggagaggatggggttgagggtgcagccatctgattttgatatgcaagcccctctttgactatagcagagagaagaaaactgctgaaacatgatgatgttttgcttagggacaaaatggtttctattgaagacccgcgtgaactcatcttgaatgcccacatggaagagctctgtttaacgtcctcagaacaggtgcttttcaatgcacaggagccagtcagccataaaaatgtgcacaccgcactaatggggacttccatataaaacaatattaaaatccaatggaagagattaggctaagagtggaaatgaaactaggcattatactattaggctgcaaattgtggggtgaacattactattaggcccttgctggtctcaggggactgttggcctctggaggcaacgggcataaaatgctgatctgaatatcataccttaatgcatatggagggattcgattacatttatcatgaaccttcgcaatctcaaactttgattcgaataaatcaaagagcactgtgagtgtgagttacggaatggcagtgacggtttatgctattcaactgacagcctgtgattcagaatccactgcctgcctctcagtgtgatgcatgaaagagggctgctgggtttggacacttgtcccacggagaagtgagcccgtttccctttcctggaattggactggcgctggtggtcctgctaacacagtggggtgggtttggcactatgctggcacttggcctgaccttgatgaggaccagccacttccaccgtggcctcttgagtcaacaggtgggccgtttgagtgccccacaggggagtccacctggggaggctctgaggccacatggagaggggagcccagtagggcagtttttcagcagcttcccctggcccagctgcacctgcagagggcttgggccatgccaaggcctcagctgccctctgagagcatcgaggcggcaccgtcgctgctgagtcctgcctgaattccagctcacaaaatcctgagacctaatgaagctgctgctgcttcagtgctgaggtttggaatcatttgttctgtagcaatgcaaagcaggaacgactgtgccagcggctgtttcatgtccttccactcttcctgaccttccacagagcagttattaaatatattggtgaccactcaagttaaaaacatgttcaatgattcttgaaaaaagggccactcacataaacttttgagtatgaggttaaacacacacctgattccagcaagtaggcacgaaaaccaccaggagaagctcaagctcccagaccacagggaccagtgctgagagcattctggagccaggcgccgaggcaccaatcccaaccccacccttaatagctttgcgatcaagggcaagtggcttagtgtctctgtgcctctgtttccttgtttgtacaagagtgagaataatagtacctcttattgttatcaggaagatgaagagagttaatatttataaagtgcctggcacagaattagtgccgtgtgtttggtataaaattaaaataaaacaggccaggtgtggtggctcatacctgtaatcccagcactttgggaggttgaggcgggaggatcacccgaggtcaggagttcaagaccagcctggccaacatggtgaaaccctgtcactactaaaaatacaaaaaattagctgggcgtggtggtgggcacctgtaatcctggctactcgggaggctgaggcaggagaattgcttgaacctgggaagcggaggttgcagtgagcactgcaggctgcactccagccagggcaacaagagtgagactccgtcgcaaaaaaaaaaaaaaaaaaattaaaacaattcttttcttgatccttcttctgaaaatactttcccctgcaaactagtgtccaaggctggcacctacactaggtgactcccaggccctcactgcattctaaaccatttccccaaaatgtctgggtagatgacaaggcaaataactctagacacctgttaaagaaaagacacagcatagccctgtggtggggcagggtccttgcttggactgggttttgctgagggatttaagtccgtgactcctcgatgctgggccggcccggggcggtggcctcagaagggcctgcagagctgtcctgcacccacgagattcttgcttcctggtctacactctcacaggtgactctcagcacagttaggactcggaactactcattagggtaatcccagaaaaacatgtcacaaaactaacaattttctttggaaaataaggcacattatagaatctaaacttaaccaggatcaccaagggaggattgctattttaattcggggagagtgcaggtcttatatttgccaatttctagactgaggtcaagagacaggtaatggaaccatccctgtggagggattatccccgggccatcctcccgagagctgcacccccctgccccggcctctccagggagggctgactgcagacccacgtgcccgccatgggcctccttatctcccagccccagcagctgaaggacagtcacctgctctaacagtggaagatgcattttcatggctaatcccaaaccaaccctcaaaccctctcatctgtcttgtgatgtgtctcaacatcttacgtgttcaggagatgcgctcatgctgtgtgagtcactttccaggtcataaagcaacacagccacatggcaaacggcatcttccgaggggctgaaagctgctttttgtctaccttcctacctccactttcaaccgccacgttccctccctgtcattctaccacccgctctcccaggtttcttgctgtctgattacccaattcccaggaatgaaggaagtttttaatattctgaagctgctcttcagcccttcccgtaagtcctcctgtgacaacttctggagaagggagtagaaagaaggttcatgtcaaaaactgctcatcagctccagctccagcagaagatcccataaagttgtttactgctctcactatctttgcgttcagccagaatcaggaaattcgaagccgtcttcccatgaggatatggctggagcctggagaactcatttctctggaagttgtcacatgaggacttgagctgtggactgaagagcaactccagagttggagagagcagatccgcagagtgggggcacattcctgacaggtgagttccatcccgtgccctgtgctggggctctgctcctctctcctgtcttggctggcaggggctgcccctggggtcgggtggactccaccaatgaggatgccccaatcctgtgctctggtccctgcctgtgacccagtggagctgggagccccaggcgggctcagcactgggactccaggagcctggctgtgccctgggcactcctgcccagcaccctcccaagactgtggctccatgagcccagggatgagtcaggcgctcagccatcactgagcccagcaggagaggagacttgaaagcaggagtgtcccacaggagggcacatcatccccagccctgacaaacgaccaaccctttgagtccccagcctcaaggctgcagagttggcagaaagaaggagacggttccaacgtgctcagagtggctggtaaagggtctttcggaccaggggtagcaggcctaggactatttctctgagaagaggacatcacccaagagcagccacctggtacactaaggttggagggacgctgagctcttaaccctgatgggcagatggcagtgcccaggcaggcagtggcacctggcgggcactgggcagtaccacccatggccacggccactgtgggggagcagggcttagggcaaagctcaaacatgtaggtttggagataaatagaacaagtcagtttctcaccaggacatacaatgtttagggagaattatggaatctctcaaaggtaaattctctcactttgcatttccttactgggtaatgagattgcgcatattttcatgtgctaattggctatctgtatctcttcagaggtaagcaggaagaagaataataaatattataatagcacacacacagtttatttgcttgctgatatttcagttctgcaatattattcttattcctataaataataaatattattcctattccttcatttaggaatattaaaaacttccttgatttctttatctctcaaaggtaaattctctctctcgctttctctagttctctttttaagaagcaaatattccttccacactcagaataaattcaggttctgtgtgggttggttgtatatacaatttagtttaaattcatatgtcactgttcttcaattaaatctcagaataggggaggagaagcaccttacagcaaccggtactgcaactctctccgggattgaacggttcttcaccaactagagtgcaagaagcgagaatcaagtctactagtattttatgtggatggaaaaaaacgcatgttttttaaacctaaatctggtgataaactgtatttgaaatcctttaagaactgaagtatcagcccaggaataaactgtgtgtgtgctgtcataaaaatagttcttataaccttgcaaacttattggtcagcattttttgtttctttaaaaaaaaatcatagttttattcttgctctagactggatttccataagtaataaaagatgctagtaaaacacggaaagcttttaggagcagaggacagaatatgaaggaaaatgaaaataagaattgcacaaacaggctcatttcaaaggcatcccctttctctgcagaatcagaacaggatgcggacggtaaggcttgagggcagcccggaggctgtcccagccacactgggctcctcacctggggccctgctggcatctggggtggatgattgtttgttgtgaggcagaggctgccctgcgtggcggggtgtttggcctccacccactagatgctggtagcataccctgcgttgacaaccagaccgtctgcaggcattggcagatgtcccgtaggggcaaatcacacctcattaacggcccttggtctagacacaggagtactagagaggaagtgaaagctgccaatccatttcctagtatacttggtggcatcacagttttcataaacacactttttatattttatttattatttattttttttatgatgaagtctcactctctcacccaggctggagtgcagtggtacaatctcagctcactgcaacctctgcctcctgggttcgagcaattctcctgcctcagcctcccgagtagctggattacaggtgctcgccaccacgcccagctaactgttgtatttttagtagagacagggtttcaccatgttggccaggctggtctcgaactcctgacctcaagtgattcacccgcctcaacctcccaaagtgctgggactacaggcgtgagtcactgcccccagccaagacacttttttttaatcaaaactctacttttaacaaactgtagaaatgatccctgaaagtatagtcttaaaactcaacttttaaaacaataatttgaaagaagggacaacactcaggagtagagactgactggaggtgggaagttacctcagtccttaaaacaagtgcctcctgggcggcagctcttagagatgacacggaagcatgaacaatggaagaaaccacagatcagtgagactattaacatggagaacctttgacactgtcgagaaagggacagacaacccggagaagtggtgaaaatatttgcaaatcacatctgacaaagatcatgtatccagaatatgtaaagaattcctacaactcaacaacaaaaagacaaaaacccaagttcgaaagatggggaaaaaatttgaatagacatttctttaaaaaagatacacaaatgaccagttagcacatgaaaaaatgctcaacgttattacgcagtaaggaaatgcaaatcaaaccaccatgagataccacctataggatggctagaatcaaaaagactaatggcagctgctggtgaggatgtggtgaagttggaattcatgtacattgctagtgggaagtaagtggactctgtggaaggaagtttggcagttcctcaaaaactgaaacataaagttaccacatgacccacaactccactcctaagaatacacccaagagaaataaaaacagatgtccacacagagcttatacagggattttcatagcagcatatatatatatatatatacacacacacacacacacacacacacgtatatatatatgcacacacatatatacacacacacacacacacacacatatatatatatatatttttttttttttgagacggagtctcgctctgtcgcacaggctggagtgcagtggcatgatcttggctcactgcaagctctgcctcccgggttcacgccattctcctgcctcagcctcccaagtagctgggactacaggtgcccgccacaacgcctggctaatttttttgtatttttagtagagacggggtttcactgtgttagccgggatggtttcgatctcctgaccttgtgatccgcccgcctcggcctcccaaagtgctgggattacaggcgtgagccactgcgcccggcccatagcagcatattttataatagccgcaaggtagaaactacctaaatgtccatcaactagtcaatgaataaataaaatatgagatagtcctacagtgggatattattcagcaataaaaaggaatgaaggactggtacgtgctacaccatggatgagccttgaaagcattacactacgtgaaagaagccactcgcaaaaacccgccttttcatgtaagattccataagtatgaaaagtccagaacaggcacattatagacactgagagtacattagttgttatcttgggttggggaataggatgaggtcgggtggggttgggcagtggctgctcataggtatggagtttctttcagggctgacaaaaatgtattaaaatcagattgtggtgatggttgcacaatcctgtgaatgtactgaaagcatggacatgtacacaccagtgcgcacccaatagccaggacccagtgagatgctgactgggcatgcggctcagggaagaaccatgaaggacgaagaatccttcctccctgcagcagctggaccaggtggtctaggggacgccatgtggctcagaaggatgaggaatccttcctccctgcagcagcagctggaccaggtggtctgggggacgccatgtggctcagaaggatgaagaatccttcctccctgcagcagctggctgtcataggtggtctagggaatgccatgtggttcagtgccaggatcccagactggttttgaaatgtggggaattaacatttaaggagactaactattctctttaactaattgctagtctggctattctgcttcgggatagagtattttttttttttcttgagacacagtcttgttccgtcacccaggctagagtgaagtggcacaatcttagctcactgcaactccacctcctggatttgaacgattctcatgcctcagccccccgagtagctgggaccaccatgccctgctaagattttttttcctatttttagtaaaaacagggttttgccacgttggccaggctggtcttgaactcctgacctcaagtgatctgcccgccttggcctcccaatgtgctgggcttacagacgtgagccatcatgccccacctagagtggttatttgaatgggtttatgagtaaaggttcagtaaatacttcctgatcaaccctgaggacccagaggaaaattacaacgacgtccaggacccttttctttgaccttttctttcgacaaagttttgacaaattttgatagtatcagaggaaaacacaggaagcacttttgataacatgagtatatcagaattcaggatttgtttttaaagaaactacacaggagaaataaaaacgtgtccacataaaaagttgcacttgagtttttgtttatagcagtgttattcatgatagccaaaaaagtataaacacaaacatctaccaacagatgaatgggttaacaaaatgtggtatatctatacaatggaatattacttagctatattttaatataatagataaaaaagaataaagcactgatatatgctgtaacatggatgaatcctgaaaacatcatgttacatgaaagaatctggacactaaagatcatggaaatcattccactcagacgtaatatctgaaagagcgaaccctacagacaagaagtgagccggtgattgctgagggctgtaggagggatgggagggattgctagaaggcacaggtttcttttggaggtgaagtcaatgttgtaaaatggactgttgggatagttgcacgtatccagtaaacaagactgcattgtacaccttaagtgggtgaattgtatgtcatttgaattacatctcaataaagctgtttttttttttaaaaaacccataaacgctcagtttatgggtagttaaaaatgaaacattgtagcattattgaaagggcatttggaaccacatgttggagggaactcaggaagccattttcccacagacaacattacttagattagtaaatggccctttcagtttaaagccacactctttgtgagatcattttgtagtgtaattaagatggcagtgtgtaaataatgagtactgtgaagcttgtcagaatcaaaatggagtcacttaggttaaaatgctgaaaaatgaagccagggaaggccacgaagggaggattttcatgcataaataaatgcctgatgacaagagctgctacaaaagactgcgaaaaccacaaccctgcaaaaagaccatcacaacaccgccccccccgccacaccacaccacacacacacacacacacacacacacacacacacacacacttccgtgaggacagttgcccagcaactgcctgtccggcctccagctggcaccgcccttgctattgatccttgtagccaaggatcattatgtcagaacaatgtataatcctccttatttttccttaaaaaagctttgtcttctctcacctcccggaatgcacacatagcttaccatggcacatgtattcccattgcaatgcaattcctagataaacatggttttttagagtctttctgtttgttatctaggttgacaatacaaagaaatgtgctcagaatattatttaaacactgtcttctagaaattacagccaagcaaacattaaccagtgtcaccatcagactgtttatcaaggtctgttatgtaactggacatacttctattttaggaacacaaaatactctgccatttattcctggaagccaccgctccatcagctggttaagtaaaataagaaggatgatcacattaagaagggggaggggggagagagagagagagagagagagattgattcagtgtggctcttttactacaagagtttgatagttgagtgaatttcaagtttgaataaaatgcacttaaagctaattcatgtaaggttaagggccgttattcagttcaaaagaatattgcacattattaaaaacagaggaatgcaatggaatactccaatcttcttaatttgatggtgaatacccttcctttagtttcatataattaaaaaaaaaacagtcctacttaattccccagaacatattcccctgtgcctacatgtgtttctgtattgaactgtgtcctataatgcagatgtggtagaagggcaataggtcaaatatacaaagaaagatctttgctcaaaagacagtaacagagaaaaaggatgtacccttctctgaatgtgtagcttggccctgccaatcttcttatctctttagtttctctcccactgtggaataggcagaatgatattttctatctcacagggtcactgtgaacattgaatgatctcatggcccttttagggctcatgtaaggctcatgacagtatctggtgctcagctagcgcggagccaatgccacgtgtcaccattatgtttttactgtcattcatcttctgattgttttccatagtcaggcctttggaaaggtgaacataaaatcttcttaagtaaaaaccaggttttaatgtgagcatcagtgcaataagtttttttttttttttttttgagacagagtcttgctctgtcacccaggctggagagcagtggcgcaatttcggctcaccgcaacctccacctcccggtttcaagcaattctcctgcctcagcctcctgagtagctgggattacaggcgtccaccaccacgccggctaatttttgtatttttagtagaaacggggtttcaccatgttggccaggatggtctcgatctcctgacctcgtgatccacctgcctcagcctcccaaagtgctgggattacaggtgtgaaccaccgcgcccggccctcagtgcaataaggagagagagagtgacagacagacagacaaacagagagagagagagactgattctaactgcatctgcattctagttcccttacctaaaggagcaaactcagaacgcaaaatggaactgccatgatctctgcagatgcctttcttcaaagctgagttctgctatccctgtgatcagaaagatgaatcatcagaacagcaaatctgttccaacttgtcctaagagctggaggaacccagaccaggctaatgcttgttcctacccattcaagagcaaaattagtcaccctgactttattaagtaactgcatgtgttccaaagagttcatgcatacaagtgcgaatagatgccaaccatcacgatcaattagggacaattcctcattttcaagagtctaaacaggatattctctgcaaatccacattctggagaaatgttgtttttcaggccacagatgttctctagccttgtagtgggtaatcaaatcaagttagaatatggttacacgaagatgcaagtcataaaaatactgaaaaacctctctatggagcattcaactcattctcacaggtcacacaactaatctatccaggaataatgcagattaaatgggtttctctgagttattcatgaaacaatacttctattttaagcgctaagggaattatgacttcaaagaaaaatcaatctcctagtctttatagtttaatgcacattattacaagctcaagaacaaaccataaaaaaccgattttcttttacatgttgaggagttggcaaaaaaggcatgagctattataatgttcctaaacagaacatctaaatattttgtattccaacaatgacaggaaaagagtgtcttaagaacagctcgtcaaaaggaagcagtatacgctcctctaatgttctccagacaccacgtcatagttcacttcgaaacgcattgcaataaaccactttttaaaaagactaaaattgccacggaagaataggcgatccaccaaatgttacattcaatctgttttatttgaaaagtataaaaataaatggttcatcaatcactacagcccctttattaattccatagaaaaaaaaaacaacaacaacgaagacacatgcttttggatgcgaagcactggcagagcccttgccaccgcaaacggaaagagggagggactcctgacccatccaggaggcgaaatagccccgcggcagcgccccacccctctgccctgccccttagggaaaacccccgcggagcctggcggggaggaacacgcgaccttcgcactcacctggcgcggccaggtctccctggccccagaaaaaggccaacattgatgatgaccttacctttaaaagaaaataagacgtttgtattccccactcccatttttttcttttttttctgctttggccacccgcggcaggtggtgcagcagccccgctctgagcagggatccgcggagctcgccagccctagaccggatcccagggaggaggcgcggccggagccaaagcgcagaggcctccctccctcgcgcgccgggtcgcacttcattcctgcacaggcagaatcatctggcttctgcaaagcagtcgcgcagcgctgtagggtgaggccggcgtgggaatctagggaaggctggaggcaaacaccgcaggaggaggggaggggaggggaggcgagccgggaggcctggggaggggagcctgggcgcgccccgggcagctcctcttgggccgggttcctccttccaggcaggcgctgggatggggccttctcctcccagggtcgccctggggacaggtcccggggcagctgggagcaccccacgcacgtgggctgggatccccgcttcccacttgcgcgctcctgctgcctgggaggccaccgctgacaccccgcggggcaggggatggggcaggggtctccggggacttccacagcctatgtccacgcggcgcctggaggggagcgggaggagcaggcaggttcccaccctccgagcccaggcaaggaacggccttggcgagggagcccgggccctccaggccacacctacggggctcctaaggccgggttctcgcccacagcagagaccctggccacgcatggccacctggcctccgggatgcgtcttcgagtgctggggcctcaataaacaaatactgtagcctgggtgctataaaccacagaaaacccttcctaccggttctgcaggctgggaagaggtggctttggtgagggccccgggcatccctcagggacagtgccttccagctgcgtccacgtccagcagaaggggcgagggaacccccagcccctttaatgagggcaggacccatccatgaaggaggggcctgtggacttaactgcaccccaaagacccacctcttaacattgtcacgttgggtgctaggtaccaacgtatgactgttggggccaccaaccttcagggcacaccagatgctcagtttttaatgttgtcacaggcccataaccttcttacatacaaaaaaattgggaaacattattctggtatgatgcatgcgtatgataataatcacatgcagattaaaatgttctagagatattgtaaatcattagcattgggtaaagttgccattattaaacagtttttttgtgcttctttatttctctaaaacaaactggtttttataataatacaaaagatcagtaggataaaaaaattttttttgaataaaactttacaaatccaccttttatattcaaatcattaatgatccctgcagtgggttgtgtcccttttcccccaaaaataatatgcccaagtcctagcccctagcgccttgaagatgtccttatttggaaacagagtctttgcagatttaatgaagttaaggatctccagatgagatcagtctgcatgggctacaaggcctaaaatcaaggcctgagtctatgtgtggacactcccctgctccgatggacaaggcccaggccacccaccctccttgtcacagggcctggcgcagtggtgctcaccttgcatcacaggccttggttccctgacagctggcggaattattcacgtagcctgtcacatcctcccacgggacacagggcacctgccttcttcatactacaaaggacacagagggcactgccttctccgaactacacggcctgccttccacagcccctgggtgttcattccattcctaggtgtgacccctgtgtggccctggctggcaggccctgtctccctccctcgggctgtgagtgactcacacctcacctggccagtgtcagatgtcaagtgtgcggccatttccatggccccagggcaggaattcctgcctcaccagacccggttatccaggtatgccctgatccaatgactagtgtcctaaggagagaagacagagagctacacaaagaagagaagaggcagggagaaggcaggggcagaaactggagagaagggacacagcctcaaggcacaaaacgtggcaggagcctccagaagccctgaggggcagcaggggttctcccacagagcctccgcctcaggcaggggaacatgaccctgcccacaccttgatgtcagacttctggcctccaggtccctaagaaaataaattcctgttgttttaggcattcagcatgtggcagttcgtgggagtagccgctcttgggctcttggaggctacagtacttttcaggccggagggtcccatcctgccgtgacttttacgaatattttcttcttggtctgacagcaaaaatacagcatagggagtctggctggtgcatctgcctgaaatatctgcaggaggtgatgagaagtcagttcaggcccttgtctcttcttgccctagctcctaggcatgcattccaaaacccaaggctcaggggtgtccccacatcacctagaatggcatcttcatctgtgtccctggctgtgacaggatagtcagacactcacagatcagacagtactgctggtacacctccaagtcttggtgggatttgctgaactgtgacctgcagctttgcaggtgcaggtgaaggcagcggccttctgtgcagtgtggccttgctctccctggtcagcagacacatggagacccacctgtcagaggggcctcagccttaaacgaaggtgtaaactggcctcggggagagtcctggggccagtagtaatgtctagcccccgttgcctgaggttgagacaaacgtgctttcctccttttcaaaacaaagtcgcaactctagcaagcatgaaattaaacgttactaaattaaaatcagagacatctctgtaccctcacatcctaccatttgcctcagccgacaacgtgctattcacactcacgtgtccataccaaacaacactgtttggatccatgctttcaccagctaccactctgagtctcagctcctctttacagcaaaacttctcaaaacagacttccatacacaccaatccaatctcctcctgccatttcctcgccaacaaaacactgattgggttttcaccactgaggtggctctgtccctgcagctgtgacctcccggtgcacccgcaatgccagtcctcagtctccatctctcttagactcccgggtgtctgatggccccatgctctctccttggtgggacgtttcctaacacctcactttggacacgtctatcctcccggctctcgggctttccttatcagcctcaccttcctgaccccgggatggtgaagtccaggctcagcggcggactctcctctctgaacccatgtcctctagcactgtgtctgctgtgctccccctgcctatctgcaggacaaccggggagtctcaacctaaatgactctcccctcgttcccctggaggagaagagaaggggcgacctcacacaggaccagggccggacggggcagaagggaggaagagttcccgtgctggcacagaggtggcagggggaggcagcagtgcagctggagcccaggcctgctgtgagagggcagagagtgagcctgggctgtgctcacaggacattcctcaaactcattcctaaaagaggtaaattcctaccacacattcgaaaacaacatacaagctagccctttacgtgaacatttctagacactggtgttttgttaagtgcctcaatgcaattatgagatcatacagtgaggttgcacacacagctaacaatgatctacactgcacttatcctaaatcactgtggataattagtataattacaaaattgcctgacttacagtttgtatttggttatatatgaattgtgctcaagcataatttaggatgcattcaataaattatttaatatttaataaattctttagtagcaaggactctgttttccaagtatcaaaggctgcagaaatgtaatattgaattttatttataattatatgataattacattttaaaatatgataattagattaatacagacatcaaactacagtgaagagaatgacaggtaggaaccacccaggtgcagagctagggctgagtgcgggaagaggccacacagtgttcaagggcactcgccacggatgacgtctgcagggcaagagaaaccacacacacacacacacacacacccacccacccacacccctatacaggtatacacaccacaaacacacatgcacacatgcgtgaacacacatgtatacacccccacatcaccatacatgcaaacacaccacatacacacatatacacaccacaaatacatcccatacatgtatatatgccacacacacaccacacacacatcctcatacatgtatacacaccacagacacacacccgcacatgtatacacaccacacacccatacatacatgtacacacgtgcacataccacatatgcacagttacaaacacagagatataatttttcacaaacatattccattatataaaaagtctcacttccaaatttaaacttttaaaaccagattgccgaagatagggaacatcattctgaaagctggattttttaggtttcatctcatttaaaacattttaagtgcattttattaaatataaaaaagttctttcctaatagtaaaagcaagcacagattttagacgaaagggcgtgctttccacttccagagtctaaaataaacctgtctctgcacagctgcaattacacggcggcgtttccgaaatgacctggcacagtgcgcggcgcctcacataggcccagggccgcggccagcgctgagcagactggtgactagaagcagctccccgtcgggctgcaccctccctctgtccctcgcgggggcatctgcagaagggcactgaatgcgctccccaccccaggaaacccagcccctccactcttccaggaaggagcgtcgtcatggccacacaggcagggaataactgatgcacagaattcagccgggccgcactcagcaccgcgctctccagatgcaaacggacacacgcaaaccggccccagactcgagaattcgtccgcagagatgcatccactacaactcaaacatcattccaccttaaaaaccctgcttaatgacatcagccctgctctgccggttttgtggcctctttgacacaggccgagatcctcccttctctggcctccccgctggctgccagatctcaccaagccacaagttacagacgcagggtgcaactgaggaacatgatcagtgaaggaagaaataaggaagggggagctttacgagtccagctaaaaacaagaggacaaactagccagacccctcggagaagcaggctcctcatttcacgaaatcggccgtttccttcagcagctcccctgacccccgttacagtctgtgacgatgacgagagacacgcctgctgccctgctcagtggggaacacaccggccccgcgtgcgtatttcgctgtttctgacttcacacaaagaactgttgttatgtttccatcacttacacgcagcaaccagcattcaatgttgtgctctcaaagtctgtttaaagttggctgcttgcaaactgggccatagtttctgacaaaaatgatgctggtaagctaactcccaggccgagaatgcccatgctgtgggcaaaagaacagtgcccgcccctgggttgtctgagcagaagctggattgtgtgcctggagccctgtcgccctcagccagacccggggtcgaggctgggccggctctccgggagcatcagggatccggttggagagaggctcatacggcggtcccaggggccacctcgagggggttgaccggagctgggtctgggagctgcagcagagggaaggcggcatgaggagagagccgcaggtggggcgtgtgcacaaagtgcaggtgtgtggaggccctgtgggtttacattgccctgaggcaccacttcacgatcaccccattatttttaataaaggttgtggagaggctgcccttgtttgctaattacgccttatatctttaatcattgcattccaacttaacaaagggattttaacaaaggtcaccgtttatcagatgaagccaaatgcccacttccctgcctccaaaaccagaatgaccttcaggtgtgctttccaccaagcatggacgagagacttccttcgtgaatctcctccagaagcaaaacattactgactcaaaacgtttgagaggctgctatcaagggtgaacctcgtaagattgttctctgatatcactaagaaattctgcatgtcaaacacaacattcacaagaaattcccacgggcgggcgctgcaactgctggacaccccgcccagcagcctgaaagcacgctcacgccttaggggaggctgctggctcccaaatgcaaacacagtttcataaaaccacaccagtaccatgccttacgctcattctcaagtcagacatggctccatttggggtttttcttactgtaaccaggttattgactattcacgggtttttaaagggtctttttttcttctttttttttttttgacacggagtctcgctctgtcgcccaggctggagtgcagtggtgcaatctcggctcactgcaacctccacctcctgggttcaagtgattctcctgcctcagcctccggagtagctgggattacaggtgttcaccactacacctggctaattttgtatttttaatagagatgggttttcaccatgttggccaggctggtcttgaactcctgacctcgtgatctgcctgccttggcctcccaaagtgctgggattacaggcgtgagccactgagcccagcctaaagtttctctttaaaaggatgccttttctatattattttattcctctctttaggagctcactgaagttttatggaagcaccacacaagtcagcagggtgggctttggggggtgcatcacatccagaggcagtccacacaaggttccgttgctcataagtgccggttcccggactctgcaggaggcacaccttaacggggacactttactgcgggtgccacgttaaatgacgactgtaggactctcccacgttgaggtgagcacaggagagcttacttgtacatttgtgctatggtttacagcacgccagcattgtctttttctatttggggcattcataaatgtgactgtatttttcagagaagtttacctctgaactcaaaattaacttttgtatgattttgggaaacaccccaatttttctcatgacaaacagagctaatacctgtctagtagggcaatgggagaataagggtcgccacagccagcacacaggagagctctgttgtcccaggggggagccactcgcaactgtggccacttccatctaaatcgcttaaaaatatgacattaaaaacacagttgttcagttataagggtctcgtttcgtgtgctgtgggccacatgtgtctagaggctaacgtgtcaccaggcagcacaaatatagaacatctccattatggcagaacatcccactggaggtgctgcaggggagtgtcttgatagtaagttaccaacaaatgcgagctgtgaccacgttgtgtggccattttaatgcacttctgcctactaagagatcgtctaatattctgctattgagttcaagagttttctagaggtttgtcatgtgggaggtgtgtgtgaaagagttctaaactctgctgaagataaggtacagtaaaaagcctgtcggcacccacacaatctaagaattttccaggcatttctcagtgcctgcatgtgtccaagtgtcaggtgagatcagtgagtgtctttagcccctacttttcagttccctaagcctttaaacatatattaaatggccaatttaagaattacatgagttctcaaaaaatctgcttatgtgacttacctataaagtagaaattttacacgtacagatctgtcaattgccagcacactgcagtcagatcagaaaggaagaatttcccagggaatttggcgctcaatggcatgacagccgtgtcacagcaatccaggtgtgggtttgggtgaccggaaggaagtgactttctgagtgatctggctttcctttctgtgaaatggttatggtgacaggggtcggtttcaacacataattgcaagaggaagtgtaagggagggacaaacagcgcattggatttggaggtttgatgggtctgggcttcagttgcacctctgctgttctccagggaggatggatggcttttcctgcccccttcacatttatgtgctcagatgtcacccagtcttgtggcttctggacctgcctctgggcaggggaatgtctggagatgttccgtagacaccccaggcagttaggattcattcttttaacaaacagttcctcaacgtcagcacccgccatgtgcacgcaccatttgggcctgaggacacctccgtcagcaaaaacaaagtttacgctcactggacttaattttactgcagagagagatgattgcataaagcagctgtgagccagtgatggcttaaaatataattatttttcattcctgaggatgatatgacaagaacagaactcactaaagatgttaaataccctgacaatctcttgcacgtaggataaaatgttgcaggatttatgattccataaaggaatggccgtgagaaaataactcctagttggaaaaagtcagtgacatttcacagctgggctgtcagtagttttaaaggaaaagcatttttcccatcaaagtgaaagattctatttacatgttgatggaaagagctgaattgcttcaatgcctttgtgtatatttgcaaactaaatgtctcatttctcagaatgtcattttaatagtatctggagagtgtcatcaagaaagagttgggttttaatgataattaaatatggagcagattctgcagggggtgtgattgcccctggagaggtgcagagcgtatgcctcattcctcctgtctgcagttagatttgatgtgcagcttaaataaaaaaaaatcagtttaatttggaacaccaaacagaccaataagttactctccactgtaaaatttacatatgattttacaggctctcagatcttatttttaagtgtggtatcttttttcttaagctgattaaatagaaaaatccagaaatattgctaggcatctttgtagaacctttttgagcctgatatgacgaccagggaaagcccagtgtctagcttttctcagcccacccacagctgaaaagcaggtttccagacttattgcttgttaggttttggaatgttttggagctcaccacttgatttcacccattttgggcaaatgtaagtgtgaagataaactacaagttgtgtttttatttttcaaggttcctggtttactgtttctaattagcaagtcttgtgagtttcatatgagaaaaagaaataataaggttttcagacctctcatcttccagttcattcgcctgtgaactgagacagtgttcaaaacaccaaagtgaaagaattcaaatggtgacaaataactcaagggcactacaaacccctcctttgggttggtgggaagtgggggagcagggagcactggggaagggtacagggtccccagagaccaggcctgttctggaaccttccacggacacccccccaccaacagggcaacacaagtgagccccccactgtgggccaactcggggcaaggactcccctgatcctttggataatcgttcaggtaaattcccaaaggtcatggctcacagatattgggaccccagctctctacctgtgaagatggggtctgcaggagccaggcagaggggagccctgtggcagctcttcctgttgtggacaactttctcctcctggaacccatctctcttcttggctctcctgatagtttccctccctctcagctatcagtcacctgggaggattccatctcctctgcataacaaaagatgccactgacactcttttccgcaggatgttgctgctctgggcgatgtcctaggggagaagggagctttgagcttccaggattcaagaggaaaacagctaccctcgggagacagagtctcagccagggccatctgcagagccagacatcttctacacagcctgagacaattccaacctgtgttaataaattgcagcctcacccagcgggcatcctctcagaaactgagatctcagtgggatgtgttaggagctgccagccactcacagagacatggattcatcacagagggtggctgtctcccagcaatcgctctgcgagttacatttggatgggtctgcagagccaggtgttttggaaggcagagctctttgtgggataaagctggactgggtggagccggtattagggggacacctggaccctacagccttggcgatactgagtgggagaggtttgcagcaggtgccccaaatcaaatcttttttttaaaaaaatacagtatttaaatatttgcttatgcttgtctcaaccctgggaagtggggaaggacacccctgtctctccctctatgtgagccctccccgtagcttctcttgctggcctgtgggctctacagccccagggagtcctgcttctgtcctgagctcttcatacccatcactgctctgagtgtgcttttgtaattttgttggtctcctgattagactgtgaggtattctgaggacagacacaaggacttcctttttttttttttttttttttacaataatagcaataagaagaaaattagtaacaccaaacaacacacagcacttgctatgtacaagggggtgcaccacacatgtggactcactcactttacataatgttatcatcgtatcatgttaccatcttaagtaagcacagagagagaaagtaacttgcccaagatcacccaactagctggtggtgaagccggaattttcatgtacaaagtttatcactgtcctatgcagagtgggcacataataaaaagtatttttaatatgtgtgtgtggggatggatgaatgcaggaatgaacaagcatttaaaacattcctttcagtcctaaacagctaattttcacctgcatttggaaagagcacgatcgatccactcatgaattaaaaacaggctgtgtgttgtcagagaaaattcgtggcaagacagcttgataaatgtcatgacacctgcagggctcagccacagctcttggttcagaagctgtgctaaggtcccaggtctgagcctttaccgtaagggcttgggagggctttgaggcaccgccaaggcagggcagagtgggacgtggggctggatgcccttcggcaaacatcactctcaccggccctaaacggcctctgagtctgggcagatttaaacgggccgttccttgttcctcctccgcgctgcatttttatccacggcaatccttacaactgcatttattagcctgacccactaccccctcccctcttccttccccctccctcctccttctcactcctccttccccctccctcttctcctcttctctcccctcctctccatcctccccgtcatcctccttccctcctcctcatctttatcgaccccaactcacttcatacaaggggagggggagtgtgtgaaacattggacctgtaagcatctctcagggaaaaatattggtaatttacaattttttctgacttctttagaaagtgcttatttaacgagcaatgggtaccatgcacaaaggggatggtgaactgcatgacgtacactatacggggggtctcagtgtgttctgcctggctatagatggcagggggcgtgggcacggccagggttggagctgtgctgcccagacctacggtcccagccacgtgtggccacctagcacctgagacgtagccaggccacactgcaccatgagataaaatatatcctagagtgtgaggacttcatgggagaagaattgttaaccatttcatgaacaatttttatatggattctatgcttacatgacatttgaggtttcttaggttaaagaaaagacatgacattaaaatgatttcccctgtctctttcctcatttcctgtggccacgagaagactgacgctcccacgcaaggatcgtttctgcccggctgtgccacctggggctccaggcctggctttgctctctggcttccccaccattggctacctggcctcgggcaggcccggcccagctctgcgactcagtgcctgggagaatgaagatgatcctttgagggtcctaagtatggggagggctgcgcaaagccatgactcagcacgtgggagatgagcgctctgcagatgcacacctgccctggggggagccgccagctggggcctgtggcaggaggcaggaagaaggaaccttgcacaggaagggcccaaccagggtctgcagaagggaaaccaggtctgctgtctcctgaggacagggcagagactgcgtgtggctgctggtgtggagtccgttccccaggaggtgtcagacatggcggcaaatgccaatcccaggactttccttctctactctaattgtgcagccgctgctggggtttatcaagtaacacatgtgataagcttaactgtgatcctcctgaatctatacgtggatgtcctaaacctcactgcctcacaacgtgactgcatttggaaatggtgcctttaaagaggccatgacattaagatgaggtcccactggagtagggtggccctgagccaacgtgatgctgtccttctaagcagagattaggacacagacacacacagagagacgaccactggaggacacagagagaagatgctttctacaagccaaggagaggctgcagaggagaccaacccttggcaccttgctgtcagatttccagtcttctggactgtgacagaagaaatgtcggtcttttaagccacctagtctgctattttgttatggcagccccaagaactcatacaacatacaatgtagacaatgtctgcaaagtccctggctcacaggaggcactaatacagtgttagcgctggcctagatagaatttggggtgtgtgtgtgtgtgtgtgtgtgtgtgtgtgtgtgtgttttgtggttttttcttttttttgagacagggtcttactctgttgcccaggctggagtgcagtggtgtgatcatggctcaccgtagcctcgacctctccaggctcaggtgatctttccacctcagctttccgagtagctgggactgtaggtgcacagcaccatgcccagctaattttttgatttttttgtagagataaggtctcactttgttgtccaggctggtctcgaactcctaggctcaagcaatctgcctgcttcagcctcccgcagtgctgggattccaggtgtgggccaccgcacctggcctcgtttggtgttttgaacatgtagtgaatcatccccaggaggcttagctatcaccagaaaaccccaaagagtaagcccacagctcagcagatccacagcattcagagaaagctgagggacaaaagccacaagcagcctggcacatgggcacgttctgagcgcttgctgaccctcccaaaggtaactgcccagcccctttgattcacactgccaaaaaggaatgaattcctccagtagccagtgaagccaagtgtcttacgtcctaaggaccaaggactgccaggcaggcaaagactgcctaagacagggcatccctctgtgggtgggtcttgccccctgcccctctcctggcattgaggcacgtccctgggttctccagggcagctggcaccctttccttcttgggttctgccaagttctgtagtaagatggagaaccaaatacaaaatgggcagagtgatagaaagctggtaaattagtgaggcaggaccatttggaaaccaaatttccctgcaacttaaaaaacacagggagtcaaaggcagaacaggagtttcttcgtttctgagaaggagcgctgtgccctgaacctgcgcctgcctggaggaagttacactccatccgcatgagtgaatcatgagtcaggagggcaggctgcccactcctctgatgggcggagtgcttctgcctgaatctgatgtctcctgttctgaccctcaactggcccaggaaggtggctcaaccacttgttaccagggacctgcaccccatatgagtggactaacactgcaactccagaaaagtgtctttttttcaccaatcagagacattccacagttaaccctttagttagtttctcttcctcttacatcctgccgtggcttattcgggatgagagagaagcaaatttcaaagccctgagtcactgagggcaaaacttgcaaaggagactggaagctcctgcaggcaacagacgaggcctccccaccacctccccagcagccaacggcacctaaagcctgctcaggaaactgagcttttatgtgaaaaagaagttaggaaataggtatgattcatttactctttcgaacatctgtaagccagttatgtgctggggatgctccaggcttagagacggaggcatcagagagaggaaagttccctccttgatataggaggggaagaagtcggatgataaacaaatcaccaggatctgtatcagagcactcagccgcaggctctatgacagcagaggaaagaatcatctagtgtgggtggggagaggtggagaaggtggcagcagggtgggaaggagggggccctcagcagcctgggccgggcagtggggcagaggcagtgtgtggggtagaccgggcagcccccaccgcagctgccctccctgctgacagatcagtaaccagcacctgaaactgacagaaactttccttgactctctcataagggggaaaaatgcctcccagaatcacacacagaaatgtgcagagtggtaggtgacacggctggagctcatgtcacgttttcttttgtgattcaagtttaatgctctactaagctatgcagcatcacagaacatgtacatgtacttggaagggcacaaaatatttcccatcaagtttaaaggaaagaaaaaaaagctcttacttcttaaaactacctacaggaaccatagttttaacatttccaagttttgaggtttttaaatgatcagaactttaaacatgagatttcagaaaacaaaagcctcagcatgggctttgctatggctcaaaatcttactctgatagcattaaacaaattaaaaacatatgtgggtgttttacagcgtcaaacaacaggaaagaaactgtacaccacagagaggtttcttgaaactggagttgcaaatcagtcattctaagacttaaaataccaacagtgttaacagcctagaggcctctgagcagagctgttttttccactttcactttaggtgaaacttaatcctcctggtgcagatactgtatccaagccatgttcttaataaattagtaacttaatacatttatggttgttattgctaattataatgctgacattatcagtaatacagtttaagtatgggctgaacaaaataatgagtcaccctcccattcaacattgactagaaccatttacatatttataaaattagtctttctaaatccttaggtaagaaactaaatactgtttatcactttaatcaagataaaatatacacaggaacagtatatagtcacctactcgccttccatggatgatttgaaagcaaatcatggaaaattactcatgtggctgacatagaaattaagtacaaatcagagaaggccccatttcttccaagtttattattactattaaataaaaacgcactacagacctcagcgaagaggtctggagactgaaattcaattccgttcaattccgcggacatttctaaagcatctgggtgtaagtcgggggttcccctgaccctcaccccggcccatcttcagcagccggacattctagtgcaccaccatctgcctcgagttggagacacataattttatgttgaattaaagtaccaacgaaatggaataatttcccttgaggggaaaacatgtatgtttaaaaaataaaaaatgttgaaaaatcaaaagtatttttgcatcagagcaaaggaatttcataatctcttccctctccgagaacctcctgatacttctgggaacaatcacacagcatggaccaagagcaagggccgcccccatacaaattagggtgggtccactgttctgtgcacactggcaggcttactcctcacagtctgaaacaattctctagtgtagagacaggggtaggcagagagacagacagctaggacccctgggcatttgtggtccttgtcaacatcattggatcatctgtcctgagcgtctcagtgggaaaagggtccagaaccccgattcagggcactacaggggaaccgaaggcaacgtagagaatccagatcagacagaggaagctgatgccttcaaataaggcggacaatggcaaatgccgtgctagaaatacaaagaagatgaattcttactagccggaaggattcgaatgacttttaatttgcagtttcccgtttaactgtattttccaaatgttccctgacaagggttacgaatgggctgtagaggagccgccactggaaagtccagtgacagtgagactgaagaagggctggagccagaggctgaggaccttggactttagtctgcgctaaggacttcctggaagttctaggggcagaagggtgatgatccagtcaatagaggaaaatcctggcagccaaagtacaagacacatgggagcaggaggaacgtggaaccttggctgtagagcccggagagctttgaaaaatgcccacgtctgcattgggatctaaggagggcaaagaccctggcaggtctgaagtctctgggagattccaatatgcaggcaggccagagcatgaccccaaaggaaggagaactggtgaggagccaagtagccgcacgcaggagaaaggaggttatcgatctaggagagggccaaggaaacagctcaagtatttcctgtcctttcgccagacctctgggattcagtgtgagttcttccagaaccagaccagagtgcaaagtcagagcaaactccatggtgggtgagaagaaaggagtgggaccttcgtagatggaattaggtttttgagctaaaagaaagtctgatgtgtttcactgtttatgaattggtgtaaattttcatgctctatcaaaccagcagctagttagagagaatgcagtttggaaatacctttttctaaaaaataaaaatgttaaaaaaaatcaaaagtatttttgcatcagaacaaaggaatttacaatctctttcctctctgagagcctcctgatacttctaggaccaatcacagaatgtggaccaagaggaagggctgcttcgtcttcctctcctcctggtttccctctttctctttcttcttctccgtgtctcttttttcctccctttctttcttcttcctaactccttcccttccttcattcctttattcctttgcaaggtcaggatgtacctactgccatgcaatcttcctgaataaattaataattaataatcaatcgtaataaatcataattaattattaataataattaacaaggaccaggcttccacccagctgtcagggaagagtgtagcagcaagagcccatgcccgtagcctctgacacaccaaggggatttgtgtttaataagaaaacaacatgcacatgtttcggatcagctcacgtcttaccgtactggccttctcggcatttaattctcgtttgcctgcgtggtttcccatcctgaatggattggctcttcagaggctaaaagagaaagagaaagtgtcagccctaagtctagtgctcttagagttttcgatgttgtttttccatcagaaagacaatcctgtgatatatgtaatgcccatttttgagaagacgaaaccaaggccctgaaaacagaagagacacgtccaagtcatcttattaacacatgctatctttccatcccatgcaaagagctagaaaacagaaccgcaccaacatccaaattctgttcagtaacacacttcaacctgtcttgagaaatcttgcagatctgtgtatatgtacagaaatatctatctattcatccacccatccatctatccattcatacctatgtacacacacagagaattatatcccatactcaggtgcattgttatgagatgagctgagatgtcagaaaggtgctgacactcttctaaaactaaaaggtagtaagaagctattcatgctcactgctttaaagaaaccatgtgagcacagaaagagccaacattagaccaaggacagcttaacagacaagtgtccaaagaatctgcagaatttgtagggaagataaagatggatttaaaaaccacattactcctcatttttattttctaacccaaaccttagcagcacatttatgatttttccccaagatatgcaaagaacggaagaattgagccacacccattccaagcaaattgctccttccagccttcctgcggaacctgccctggccttggggctcttcagctgagggccactggaaccatcagcccagaccacgctgcaggtgaccagagtctttaaggacaatgacaacatgttttccatgatggatgtattcttttgcaaaaaggtgtgagtacccattctcctgtagaacccaggaacagctttccttgagagggaacaagatgaactgtcttctgaacacggggagagaggactctccaaaatagtagatacacccgaacacaatgcaaattgtgttcctcaaaagtctctctttagaaaagagaattgcctgacagctgagcttttccatctcccatgttaccggggtccctttttggtggctcaggaagactggctgaggacacttttctgcaggcgggcacccccatcaccccacagccactggaaggattgctgagaagagaagcaaacgcctacagcacagtcgccactcccggagtccacctccctcacgtgtgtgggagacgactagcagccgaccacagactggaaaccccacccaccttcagggtgtgtgatgaaactggggcccacgataagacttccggtgaggggctcgtgcagggagatttaaaacacgtgtacttcaagcaacttaggtcaaagtgcccacagatgaggctctgcgaaatcaaagacgcggttctagtgatgatataaacacaacccacctgcaagaatcaggtgccttccccatgcttcatggcatgagagtgaaaaaagcaataatagtttgatatgtatgattttaaaaacgcaaggctacctttgcggatgatttcggtgtccagtgtgattctaccttcccaatttatttaaattggacaaccaaaaaaaccttgaaggggcattcttctcattgggaaatgagggtttgttgcacatgtggtgccttactggataagaatgggttaaccaagggaaaggccaaattcactgtgtccttttagggtctaagaaagaaggggtgtgttccttgtgaggtgtcgtttgaaccctgggtacacaggggctgtcattccctaattctgcctctctaattccatgtggtgttgttttaactaaatattaagagcttgcaggatggacacacattatagaataaaaacatgtcaaatatctgtcaatccatctttctgtttaagaaataagagctggtctattcaaagctaaacacaggcaaaaacaggtaacttcctttagttaaggttgacaacttggacctttgggggcattttgcccatccagacataaatgaacctcctatcaccggctgtgttctccaagtgcctgttcctggcccaggcatcatctcatctctgcctcctgtgagccctcgcctgcccagtccccttcctgttccctggctctatccgtttctcaccctcctcctcccacctccttatgctgggactaggcaaacacaaatgcaacactcactccttccaggaaacaaagctccaaggacttgtcccaaatcagaatagtgtgggccatgtaaatattttgggacttgctggtagacaaagagagctatttttgggcaaggggctcttgaacgcagctgaaatctgtccacaaggtgctgaactgctccttggagaggggccatgtttcttccgaatcagtttgttctgatcaaatgttgtcatgcttcatagcacaactctaggttacgcttgggatgattgatcttaatcatgatttagaaaactcaagaatactggacacagaattggtgaaaataactcaagtccagatcagacttttgaatacatcttgttggatttgactagttagacaagcctacttacttgcatttgactggcctctcagattaatataaagaatatttatatgaatcactgagggttggttaattctagccttaaatgcaaaatttatatactagcaggaaaagaaagacaagaggaacaaaacgacaacttgatgtgtgggagcccccatcagagccgttagtggaaatggcccctgagcaccggtaagtgagacgtgtctcaaggaactatggtgggaacgacagagcatctggctgataatcacgagtgactggcagtctgccttattagcttctgacactctgccccagtctgccttttagagaagagctcgagaaggatgaagctctcactgtcacggggctaagagctcagcctggcagctggtttctgtaatgtgctgaaaagatccatctgcacacaaaagcagctgcatgcttggaggaaatcttttttatttcattttttgcaattaatcaaattgagagagccagagaaaaattgggtaaacatgtgaaatgctgcaaggaaagtcagctgactctgaagcatctcttgggtaattaaagaagccttttgtaaactaatagaaaaggaaagagagggaggaagaactgagctagagctgtgggagggacagactttcagattccatcaggaccgctgagacttccgcggtctcagttggtattcagttctagatccgatttccagccactgggatgactggacactttgataatgtctgtgtgattatcaacacttagtgttacctcgagggttaacattgggcacaggcaaagttagtcacccagatttactaggaagcagtccactgttgttgactgttaggctctcgtttttaataatgtacacctaaagcagcttagactacatgtcaccttggtggaaccacaggataattcagcatagataaaactcactagcctatctgtgcagggaaatagctcccagctgaaatgctggggaacaaacaccttgttcctaggtattttactgatttcattctctaggtagttctgactttctacggtgaaaatcaggcaggtgagacctaggtctcaatccaggttccatctgggtgaccccgaacaagactccacttttctgagcctcagtttcccataaagtagaggtaataaaacttgcctttctgcactggtgtgagaatgaagcccatgtgggctgcagggctgggcagggctagggttagggttggggtatgctgcaggcgttgctttgctttctgtcttcctcttacctccaccaggtccagggttccctgggtgggtggtgagcagctgcagaaacatcgctacctacttactatcacacatgttcagagacctctagatggcttcccacatctagatgcatccactcctaaactgacaaggtcaagggaagaaaaaaggctaaaaacaccagctgcccagaagttacatcctacaattgcctgtcaacaaagctcttgatccaacacacacaactgaagcacaggggaaatgcaactgctgctgctttaagaccacacaaagtgtcctggggtgtggaaggtgaggaaagagggaaaaaagtgaagaggaaggacattcacgagacagccatgccccaaacgccagacaagtattcaaatattaaaatgtgaaactggctgtttttgaaataattgtgagtgcaattttacaagcaatgggattattgtgaaatcccttgtagaaataaatgcatcgtgagatagagaagacctcaatgccagtcttcctagatagttggcacttggttacccaaatcatcttactcccactcccaaacctgcaaaaatgtagggagcaaacatcgtgcctgttgagggttaggctgacaagcatgtcaggtgccataatgcaaggtcaagtttatgatggcgtggaattcatcatatgctctccgcacttcattttgtttaggcttattagcaaaacatttgcattgtgtagagctgcagggtatacccatattataggacacagatcacgcttgtgttacttttagacttaggattctttggacgttgttttcataacatgcttttgattgcacagtttttttttgagtccatgttcaagaaagcaatcctaaagtaatgtttctatggagataacaggatttattttacaatgatttgctttatccctcatgtttctataaacctaagttagataattacaggaataaccctgtaagcttcattcccattttacagttgagaaagtttagaagactgaatctagctatgagaatgcctctaggaatatattttagttatgaacagagttatttacattttgaatgtcccatgtggaaagtatgacagtaggcctaagacattctacattcctaaattattaatcaatacaataagagaagtgtgcagtggtgagggtctcagaagcggatacgaggcagcgtgatgcggtgtggggaccggccatcagcacctgagaacttcttagaaacacacattcttgggccctgaactctttgctttcagaagcactacaggtgatttgtgttcgagaaccttcttcttatagatcagggggcaaaaacctatgacatatgtgaatttttttttttttttcagaatagagatttcccatgcttgtgtcacaaggaccttctccccagtcccccaccttcccttctccatgtagtgagagaactgcccctctccccacaccacctgccttgcactggccacctggctgccctggcagggactacatttcccagcagcccttgcagctgttgctggtcaccgccggacaaggggcctttctccattccataagtgtgtatggaacttttgttctaagaccacttccctaggcatcagataaattagataagatttttttttctgtatttggaaactgtaacatgttatacctaaacagacacatgagaatatattataaaacatataaattgtggttaatttaataaaatctaaccagcaggatccacttgggaaagtcttaacttgtgcctctgctagtagaatttgaagagcccaccatgaaggcatctttttctgctttctctgctttttaaaatcccaggagcaatgttttcgacatcccaggtgctttggagtcttcgcggtgtacgggaccttaaagctgagctggctgtattgcctcgtggctgctccagtcctgtgctagacctctcgctgggtctcggggttctcagcgcctgttcagaaagcctggcaatgtttgcctgggaggaaaagctccataaatacacgctgaagacacgactctgtgggtccgtcagatgaaacacagcatcacccagcatccaccgaggagcccagtgctcatgggcacggttctgtattttggaggtgccatgactacagcttcttgaagaaggcaactaagggaaacgctactgtggatctgcacacatcagaaaaggcttctctgacccctcaactgtgtgcaaaataataaaggagataccatgtagaattcaggtagagagaggtgcagacccagtatcccaggaaaggaaaacctgaataaacagtggaactgtggaaattccagaggattgtcgtgcccctttgtagagacgctaaaggccaggcaggggcagcagcagaaggctgtgggctgcaggaaggagacccccacgggagggccctggtgtcgtgtgagccctgggcaggtccactcggtcttgtgaggcctctgcctcctctccagcacccagggcgggattcaccagggccaccaccaacatgctgagacctggtgatctcctcagccgttggtaactgcttgggagaccacgccctggcttggcaggctcagtaagagctgtagacaccgcccaccctccctgcagagagaaaacagcccctcacccctagaacacggacagtgacagcctcaagtcggaggggcaggccctataactctgcttctttgacatttgaaaaagaaatcctggagaacaaatttcaaagaacaagcaactcatatataaaataaaaccaaagatatctgaaagaaaataaatgaaaccaagtgacgggacttctcttctttcactatccttgtctcctttctctctcccccgacgtccctccctccattcctcttcctcttattctaccaatacccaagcactgaagactgtgttctgcaagcaatcatttttatttctcaaaccaaaagtatgattgtaacactctgtgttcggagcatagtacacagctaccaacgtcaccaaaaacccgtagaatgaacaccgtgcacacgcacacacacacacacacacacgtgcgcgcgcggcaaaaagaaacagctcatttcggagctgaggacaaggcgtgggaagaagacgcgtttggtttcacccaggcgggtggcggcaaagctgtgggatgcgcgctgcacactccttccgtcatcccgttcccaccttccacacacacctgcgggaggtcggacatgtcctgattgcgtgttcatcacgatggcaaaccgaacatgaggagaacgccactgacgctgggtgcgccggctttcccagccctcgtgcataacggggagggagatgcagaagttttttccaacatcggtgcaaaggggaagctgaggttttcctatggaggagggtcagatccctctcttcctcatctccctccccctcccccttctctgtttccagctccctgtggactctgtcccacccacaagctcgaggctgctgccacatggaaggccgggagagagacgggcggccaggacaggggccggctgtttgcaggggaggcatgtgtgtggagaacgcctaggagcacgtgggtggccacgaaccctgaccgtgcaggtcgagaaactcttccaggatagtatgtggtggatcgtgtctgcctaaaaggtatgtccaagtcctgaccccaggacctgtgaaggtggcctgatttggaaggaaggttttgtagatgtcctcaagttaagatgaggtcatcctggattacagtgggctctaaatgcaatgactgatgttcttacaagagaaaggagagggatttttttttttgagacagagtttcactcttgttgccgaggctggagtgcgatggtgcgatctcagctcactgccacctccgcctcccgggttcaagcaatctcctgcctcagactccagagtagctgggattacaggtgtccgccaccacacctggctaattttttgtatttttagtagagatgggggtttcaccatgttggccaggctggtctcgaactcctgaccttaggtgatccacccatctcagcctcccaaaatgctgggattagaggcatgcagcactgtgcctggtcaaggagagggaattttggacatagatacacggcatttcacacagggagaaacaccacatgacaatggaggcagagatttggaatgacatggctacaaggccagggacaccagggattgccgcagccaccagaagctggaagaggtgaagacagagcctcctgcagagctcccactctgccaacgccttgactttgcacttctggcctccaggactgtgtgtgtgtggggggctgcttctgctgtttcaggacgcccacctgtggtgccgccttgcagcagccctacagggtaacatgcagggaagtgggaagtaagtggagacttgcaggatgcagaaggtgcaggtgaaggtgctgaggagggaaacagcgttctgggcagagggcacggctgtgcaaaggccctgttgcacagacactgtgagtggagtttgagtgtggcatgaagtgacctaatagaacagaatctgcgaatgcacggggtgcactcatggggggattgggggagtgacttagaccacgcacacagacaatgttcttcacccgttttgaacagtgagtcaattctgcccatgagcaagtcttccagactgttgggccctagacgaagaacgacctgcaagccgggaattctctgcaaaggacaatgtcaaaactcatctgaggcatccatgtctgtcctacagcaagcttccccgtgacactggagggacctaggctcccggcagttttcaggagccagccctgggctaggggctccacagtacttgcaaacaaagagttccaaaaacccaatttgcattcacccatgtaagaagtgcctgataaggaagtagcgtctctatttcctgggatggggatttttgctctggggtatcagataatattatttgtaagctagtcatcaccatccttcgttttcttctgccttagcagattcaggtagatttatggcactgactatcactgctttaaagttatcaaaaatcactttaaaagaaaatgacgagattgcagaaaagtggagtttattgaaaatctgactgtggtcccttgaagttactgcttacaggatcagctgactttggagagaaagccattatcagaatcaagcagcaaattactggccccagagttcctagcttgctacaatatcagctgtctaaaccaaaacaaagcattttgttgaagcggggaaaaaaaggcagatcaaagagtagctcatccacgtgtcagttagattagcatttgaaattccttgtgaatgtatccacatgtttatgacaggcatggtgttcagctttagcagcattatggggagttacgaaattctctgtgtaaaaatagcgaggtcatgaggaaaccactcttgctgtgtaagtcctgacaagccatgccaacaccgtcacgctgggactggccttcggatggcacggggagggcagagtcacgcaggcacacgtgacacgcccttgctctgcggccggtgggatccctggtagcttcgcagtcatgtggggcttagtcacaggagcataggtcaggtcctgctgagccccctttccaagtgtgcggtgcgcaagccgcccaacccaggggccggcagctgggacagggcgagcagtgggctgcagggaggaagtggggaaggcctgggggcagacgtgcctgggcgagggccttcctattcctgctctccctgtctgctctgaggatgtgggccctgacctccttatctgtaaagccctgatggtggatgcagcttcctggagctgctgtggaaaccactggttaatattttacaggtcgctgggttacaaactgtcaagtcagaggaacactacacgctggcaccagctgctcctctgtagccacccgtatgtccctcctgagccgtggcagggagtgacacctttgccaataccaccatccacagggtcaacatgaccccgggccctggtcttagtaactagaggaaacacaccgacttcaggcattgctcacagccagagctggtgttaactgaagaatgttttaattcacctgccgaggaactcacacattccttgccagcaggcacaatggctcttgatagcctgtgtgcagggaacaaatgtgttggccccatgctcaggccatgcgtacacataagagctgtcgtctgggtcttggctaaaataaactgaatcttcccgaaaacacaggttcctattacggagtccatgataggaaagatgttcagctctgctgctatcatggggaagtagagtggttgatctgaaatctccagattctaatcaaggagaagaatgctgtgctgtggccacagaccccaccgtggtctcaaagaaaacctggatcagagcccatcttctgatcagtgccacaccttcacatgggtgtgcagcattttactgggtgactgcctttcagaaccttctggaattttccagatccttccagattgcaataaagaaaaagaatgcaatgtgtggtcattaatctcagcatggtcctgcagaagaactggctctgagctgatctcctaaggggccccacgtcttcacatgggtgtgtagtattttactgggcaactgcctttcagaaccttctggaattttccagagccttccaggttctaatcaaggaaaagaaggcaatgtgtggtcattaacctcactgtggtccctcagaagacctggctctgagctgtctcctgaggggccccacatcttcacatgagtgtgcagcactttactgggcaactgcctttcagaaccttctggaactttccagagtcttccaggttctaatcaaggaaaataaggcaatgtgtggtcattaacctcactgtggtccctcagaagacctggctctgagctgtctcctgaggggccccacatcttcacatgagtgtgcagcactttactgggcaactgcctttcagaaccttctggaactttccagagtcttccagattctaatcaagaaagagaatgcaatgtgtggtcattaacctcaccatggtctcacgaaagacctggctctgagctgatctcctaaagggccccatgttttcacatgggcatgcagcattttaccgggtgagtccttaacttcgcaggacacattagaaagacaaaggatgctagcaagtgacaattatatttaaagaaaagggcaggagacacagcatgaaacagaatgatgcattgaacagaactagatttgggctcaggagagcttggagagcagccagcatcgacggggcgcttactatgggctaggtgctcatgcaacaggtcagaagtatagcttcttagtcctgtctactgtacaaggaggcaagtgctattattatgctccccactttacagacgttgaaactcatgaggtttagaaagcccgagtaatgcgtgaccagcctggccaacacggcgaaaccccgtctctgctaaaaatacaaaacttcaccgcgtatggtggtgcatgcctgtaatcccagctactgggaaggctgaggcaggagaatctcttgaacccagtaggcagaggttgcactgaggcactgagtcgagattgggccactgcactccagcctgggagacagagtgagactctgtctcaaaaaaaaaacaaaacaaacaaagaaagcaagcccaaggaacacaagtccacacagcaggacctgacaccaacaccaacaggtcggagctgagctgtgctcctggctgctacgtggtttgtgacttcaccaacctgatgacctggtctttggtttcttgatacttgaagtcctggatttcttacggaaaagacctccttcaaaaggctagagggtgctttctccttcacgtcacatgtatgctctgaagactcaaaatatagtaacaactccacaactcatttccttctacatgaaaactatcacagagtaacaataaattatgaagaactataggaatttgtcattaagtgaagtatcttttaaaactctgttattaaaaatggcatttaaatgaatgattcaataataaacacctagcatgcatggtgtatgttatgaacataagactgccactgagcttgcattctgaacttgaacttttcgagtgttttctgcatgccattaaatttctacatgatatttttgggcctaaaaagatcagtagccttcaaaaggtgacgatttattatcactaggtagaggccttataattttatgcctacatcaaaatcaagattatccaggaaggcttttcacaaggggtaaagaacagggtttgaaagatgcaaacacgttggcagaacacattcatagttccgtggcttgcctgatagattgtgactgtcctgaaattataataaagtgtctgaactattgatacttctccagaattccagtatctgtggatgggttatttcctagttgaccctgatctcagattttgaatgaggtaggtaacatcctgagactgcacagaacctctgagcagtgggttggagtgggataggggacggtgcgttggagtgggatgggggtcagtgggttggggtgggacgggggtcagtgggttggagtgggatgggggtcagtgggttggagtgggatgggttggagtgggacaggggacagtgggttggagtgggaggggggacattgggttggggtgggacgggggtcagtgggttggggcgggatggggtcagtgggttggggtgggacggggacagggggttggggcgggatgggggacagtgggttggggtgggatggggacagtgggttggggcgggatggggacagtgggttggggcgggatggggacagtgggttggggcgggatggggacagtgggttggggtgggatggggacagtgggttggggtgggatgggggacagtgggttggggtgggatggggacagtgggttggggtgggatgggggacagtgggttggggtgggatggggacagtgggttggggtgggatggggtcagtgggttcgggagcaggaggcctgtgtcccaccccatctctcccctagggtggattggcctcagcccgactgcttggtctctctgagctccacccaccaccctcacaacatgggctggattctgggggctttgcacccagcagttggcacaggacaggcctgttcaggttttagcacagtcggccatgatccgtgagctgctgacctggatttttcccactggaggccaaatccaagaggaaatgcaggaaatctcccgtgtgagtgtctgccctgtgctcggcaccagggttcacagacagagacagtgcggaaagctggattccaacacacaggccacccgccccacccacacacacactccacagacaccacacacacacacacacacacacacactacacaccacacacacacacacactacataccacacacacacaccacacacacactccacacaccccccacactatatgcataccacacacacccttcacagacaccacacacacaccacacacacacactccagatgccacacacactccacaccccctacacactatacgcacaccacacacacactccacagacactacagacacacaccacacacacactccacagacacttcacacacaccagacacacaccacacacacagccacaacacaccacacacccatgtgcacacacactaccacacatggtgctccttcctgctgtcccagggcgctggaaggacacactcacactacccttggctgtgagacgctgcccggcagacacactttcccttgcaccctgtctgtgagggcagctgacaggggaaagcgaagaccacagttggtcccacaggtccctgaggtggagctggggcagccatggcttggagctgtgtagtggaggtgtcacttgccccagcccagaacaggcaggggcttggggacctggaagcctcgggagagggccggaggtgtcctggaagccaccaggaccctgtggggtgctgagaagagccactgtgtcactgcccgagcactgttctgcttccccatccccacgtgtactccatcaccacccctgccacaggagagcacacccagccgggtctctgtcttgtcaccatggtgtccccaggacctagcacagtccacagcacacagcaggcacatggtacacagtaggcacacagcacatggcaggcacatggtacatggtaggtacatgacacacagtaggcacacaatacccagcaggcacacagcacacagtaggcacacagcaagtgtttgacaaatgcctgtcaagtggatgagagaatggcaagggaagtgcttgctcttccctcttacctcaagccgcgcccacacagctcaacaccctccatgtgtgtctggagaagagaccacctggtgagccccagggagccgagagcaggagccaggacttaaggctcctcccagaaaaccgaagccttgattctggagggacaagggacaccccaagggaagtgtgtgagcctcctgaggaaatagggcttggcaccgaagttggggtgctgcggaagaagggactcagagaaagtcaaggtggtcgtggctgtggaccagctcccttccctgagcttgaggctgaagcctcagctgcaaagtccccaggagacagagagggccctggggcagccacgggagaggcctgggcgcagtgggagcagctgcagtggcccaggccacccccaggtgactctcctccagggcagacagggaccctaacagggtgggacagaccccaatgtctccagagacagagcaggacctgcaatttaggaagagcacagccgtgctcagcccacgaagcatgaatcccgccttgtctcgggtgaggtatgctaaagggttcgctctcgcttggtgcgagcattcttctgtgaatccattacgggtctcaaagtcctaatgcagggaacacacgctcccgtaggcttctcccaacgctggcaaaatagaaacctctaaaatctggtcagccctcgcggcatctggtgcagctgtgaccggcacggccaggtgacctcagacgcgctgcacacacctgggaggctgcagaggggcagctgtgaagtggggctgtgacgcccagaggcactcaggcattcagacctgcactgacccgggacaaagacctcagcgtggggtgtttttcttcctttcaggaagccccccaggcgctgatttgggcctgagctaggcctgcttgaaggaatgaatgaatgatgaatgaatgaatgccctctgcctggcttctccctgccagttttcatatctggctttctctgggcctccagactattttacaaaacgcattgttagtcacgaggtctatcgcaccagcagcagaaaattccagagagagtggcaagaaaagttcacccgagaaaaggatggggaaatattgggattcggaaaaccacgttaccgacctttggagctgtcctctgagcacaggtgtcatggtaattaagtgtcactccatggaaagaggtcaggaataaacctgtgtgtgtgcaatcggtaaatttttcaaattcctcttctacacatgttgtaaaaacaaacgaagttgaatctacaagatttaggaccccgtgaggatcaacccatacaaaaataccgccaggaccttttctatgttcttgagcaaatgcagttgttttgtttttgaaattgtgtgaaacgtaatccacattttaatgtacctcccattaaaatttaaggttgggcacagtggctcacgcctgtaatcccagcactttgggagaccaagtgggaggatcccttgaacccaggtgttcgagacaagctggggcaacatggagagactttgtctccacaaaaaataaaaatacaaaaattagcctggtgtggcagtgtgagcctgtctgtggtcccagctactcagggagattgaggtgggagggtcgtttgagccccagagattgaggggtcagtgagctgtgatcacaccactgcactccagactgggcaacagagggagactgtgtctcaaaaaaaaaaaaataaataaataagatttttactttaagttcctatagtacgtgttattttggtgttgcttatctagccgtgtgttttagtgttaggactctttcctaatgaggctttaaccctggcatttcacatacatttaaacatgcgtgttcaggaaggctgctgccaggcctcagctcttctgagttctcccgccctgcatacacccattttcaaccactagtctgaaatgaataaggtgagcttctaacatcttgcttaaatcctcctgtcttcaaatatgtctcggcatatgaaaataatgacagaataaaagagtcatcatctccctttaaaactcacaatgcctttcatacagcaatctaaaatgatatattgaagctgtccacagacgtgctatgcctgtttctgaaatacaattgatttatatttatatttatatttctctttatatttctagaaagaccagctgtagctggtgctcacacttcataaatcttgctctcaagctgtcccaaggttattacattttcagatagccgaaagaacaggaataaaaacacctggaacacacagcctgccacaaccccatgtaagagaaaaccagctcctcaaatatgtgagagtctttgttgttgttgtttttgtcaaattactgagttaatttatctggtattttcaggcaacaatttaagctgaataaatcatgccaggtctttagcttctgattggtggagaacagatttagacacatgacttctggaaagtataggctcttgctgtgtatcagttggatgatgatgagtagaactggcagaatccgcctcagtttatgcaacaagtattagggactgtgcactatggtagacatcagtgggggctaacacatgttttaacagttttccagaacagacgtttgcaatgtagcatttaagccccttgtaaacaaaatgctaccaaaactggagaagacagccatcctttttggaagctgtgcaaggaaggagacagctgagaaacaagggcaaggaggcgactccagaaaggagtggactacgccaatgatgagctgggaatcccagctagagtctcagctagagtcccgagaagtctctcagatgggcaagctgggagacgctcaggcagctcccgggacagtggaggccaagtgggaagtgaactgcggcatagaagacagcaaaacgttacactgtattttgtttctttcttttctttaaattttttatgagacagaatcttgctctgtcactcaggctggagtgcattggcgcaatctgggctcactgcaacctccgcctcccgggttcaagcagttctcctgcctcagcctcccgagtagctgggattacaggcgcccaccaccacgcctggctaatttttgtattttcagtagagacagggtttcaccatgttggtcaggctggtgttgaactcctgacctcagttgatcctcccgcctcggcctcccaaagtgctgggattacaggcatgagccaccgcgcccggctagtatattttccattcaacataattctgccagttctagtcgtcatcatccagtctactctactcctctaccgagcacaacccccttctttagaaagccagcagcattttgtatacatggcagggtattgagcaaatattttgccatgggaaaattacttgggaacttctaagcttcctaataaaactataagcacttcaagggcaagaatgacatctattttctcttaacataccctgaaatggacggcatagtatttttgtacacagtagacaccaaggaatttttaaaaagtaatggtacgtttgctgtatgtgaggagcctacaacatagttctataattttttgctttgatagcaagtttagcaaacatggtagctttcaaccatacaagaaagatgaagaaaatgagtatccataaacgttcctcatcagatgaagactcacgcaggacataaaatgttattctctaaatatggaaaaagcatcaaaaatacatgatgcaaataaaaataaactgtcaacaaaaagctttagtatcaattagttattctaatgcaaattcaatttatcagtgaaacagaaaggacttcctgatcacatgaaagcacacatttgagagcttgtgtgggtctattcagatgagctgtgtcgacctggaaacaccgaggcactcacggtctgtttccttccttcacttacagcagcaatcctaagttaacccggagctcattaaaatacatattcctgggcccgaccccaagactgtggggtggtatgccagggtgggcctaggactctgcatttaatttgaattctcagtgtaatgtgtgcaggtggctgcagaccacaggagccagcttgtcccctctcctggtgagcaggtcagggggccacggcagatgcttggcttgggagttgggcgtccagccaccaaggcaattctgtccctgctaggactctaaactgatccaggtagctttgttttgttttccgtgtgtattgacctctggagctttaggtttcttaatcaggctccaggtgaaaagcagatctgagtagagcatttctctgtctctctgggttggtggtcagccgggaagcagcctagggcacctgcacggagtctgcgggtggagctgccctgagctccatcccttcccagcacagggcattttgctcttgcctgcagggcagcatgggcacaccttcctacctggaaggagcagggctctctgggagcatcccgtgtcaccagatgccccaaaagacgggccgcaacaccagcagtcccctgaactgctgagaaacctccctttctccagcctcctgcctccccctcatctctgcctctgggtcctttgtttccatgttctatctcctctttattacttgcctttttatacattgtatatgtggtctctaatgtaaaattaaacaggtaatttggttaatcacttactatgaataaaacttcattttctttcttgacctttggaaaattggggagctgaatattaatccctttactcttaaaggaagtgaattgatgtaaacataaatcgctagaataactcttctggccaccacgcctcccaccccccaccccgtgctggcctcctttcttggggctcagtagctgctgtggtcgctgcctgcacctccttccccagctgcacccccggaagtgggggttggacgcggggcagctggggccgcactggcctgggtgcctgtctcaggtgagttcggaggggatgggagaggaaaggagcaaagtctccctcggggccagtgggggagagcccacccacaggagataggagatagggctttggggacttcctgaggctgttgagcgggcagccacactttacctccagagtttctgagccaggtcgcctgcagagtgacaggaagtggggccctggtttgctggcctctgtctgaatcatgctagactgctcttagaggcccagctcattataaatcctggcagccaagaaggaaaaagggctggatccccatacaaattttgttccttaaatcttttcagatttagctagattctcatggttcttcctcaagtcatgggctcaagagtgaggttgcaaacacctagttaatccccaggcctgtgctgaatccagcccactcctctgaggtcccggctcctgcccgtttctgcacgcttctctttttagatcaatttctttatccttcctttctgcacttatattacttgaacaaatgacaacgaagaggagggagactgtctctcctgccctttcttcttcctctccttcgccttccttgtcattgtcatgctcttaccaaatttcagtaatttcacctccacacctgctttcagattcctttgtggggccttctaatcttcctctctaacacttcattatcgctggtgtcatttccccccaaactttacattggtttatttattgctaatataaattactaattagttcgaacatattaaaaagcacagataataatctacaagacaactggcttatccttttcatcaaaaaaagtaacacattctgttatttgtataaaatctcaaaatatttttaagaaataaaaccatgcagagacagccaattccctcccctccccgagattagaagataacattacctggcttctatatgtcatataatcccacgtaatcatgaccacatgttcttttgtggatttgaaaattttaaagaaatagaataatactatatatattcatttgcagtttgctggtttccattcaacactgttatttagaattttgtccatgttgatacacaaagtctgggtagtttaactgttgtaagtaaatcatagcgtaaatctatagccctactcatggggaattagtgtgtttccctcctttttttttgtatcaaaacttttactcgataaaatatgtacacctagttcagtagtgctgagagggaattcataccctgaaatacttatattagaaagcaggaaaagtctcaaatcaataatctaagatctaattcaagaaaccaaaaaaaaaagagctaaatatatacaaacaaagtagaaggaaggaaatacccaagaaagaaatccccaggcccacatggtttcaccggaaatttctactaaaacagttaaggagaaatttatggcaattttatacaatctcttccaaaagttagaacaagtgggaacactttctaactcattttatgaggccagttatcctgatactgaaactagcaaagactatacaaaaaatgagaactatagatcaatatctcacaaacacttagaggcaaaagtcctcaacaaaatattagtaaagtgaatctagcaacacataaaaaagttatatacatggctaagtggaatatatatcagatactcaagggtgggtcagcattagagagtcagtcaatcaactatccatcataccatgaagtcaaagaagaaaaatctcatgaacatataaattgtcccagaaaagacatttgacaaaatacaacacacattcatgaatagacatggactattgacttgataaagaacatccataaaaatcctatagctacatcataattggtggtaaaaactcagtgctttgccctttaggtcagaataaggcaagttcttgcaactcttattgaatatagcactggacattctaaccagtacggtaagataagaaaaagaaataaaaagtatataaattggaaagaagaaataaaactatccaatttgcagataacatgatgatctacatagacaatcccaagaaatctaccaaaaaaaatcctcctagatctaataaggcagctcagtaggttgcagaatgtggactgacacataaaaattactcacagttctacctactccacaataaacgtggaaactgaagttaagacacaatgccatttagaaatgccccaaagaaaataaaacacttatgtacactgtaaagaaatttcagattcagaatctgtgcactgaaatttataaaacattgatgaaagaagttaaagaagacctaattacccatagagagacaacctgtgatcatggattggaaaactcaacacagtagaactattaattctccctaatctatacatttgaagaaattcctatcaaaatcccagcaaggtttttgcacccataaacgcgctattctaaaattcatatggaaaggcccagaacctacaatagctaacataagttttataaagaataataaagtggaaggaagtcactccacctgattaaagttgactatgcaactacagtaatcaagacagtgtgctcttggcagagagactgacatatagactaatggaacagaatagagaacccagaaatagacccacagcaataagtggaaacggtttttagcaaaggtgcaaaagcaatttaatggaagaaggatcaccttttcaactaatagtcccggagctattggacattcgttggcaaaacccaaaccaaaccaaaacaaataagcctcaacctaaacctcacacctcatacaaaaattaactcaaaatggaaaataggcttaagtataaaatgtgaaactataaaatttgtagggaaaaaaggagaaaatcttcgggaacctcaggctaggtgaagacttagacttcacaccaaaaatcaaaatccaaaaaaggtaaaattaataaacttgaattcaacaaaatgtaaaactttctgcaaaggactctgtgaagagggtgaaaaaacaagataaagtggtagaaaataatcaccgagtggtaaggccagcatctagaaaatataaagaattaggaaaactcagttgttaaaaccaaacaatccaattaaaaagtaggcaaaagacatgaacagacttttcactgaggaggatacacagatggccataagtacataaaaaggtcttgatgtcattagccatcaggacaatgcaaattaaaccatcaggagatatcactacacacttattagaagagctaaaataataaaaaaaaaaaatagtggcaataccaaatgctgcccaggctgggaaggtcctgaatcactcacacaccgccggtgggaatgcaaaatggtgtagccattctggaaaagagttagcagtttctcataaaattagacatgtgctaaccatatgactcagcaattgcactcctgggcatttatcccagagaaatgaaaactatgttcacacaaaaacctgtacaagaatgttcacagcagctctatttgcaataaccaaaacctggaaataatccaagtgcccttcctgggtgaacggttgaacacaccttggttcatccagatgacggaacaccactaagtaattaaaaagaaacacctatggacatgcttgccaacccggatgggtctcaagggaattgcgtttagcggaaaaagccagtctcgaaaggttgcatagtgtatgattccatttatagagcattcttaaagcgacaaaattatagaaaataggaaccatactgtggttgccagcctcagggagggggaaggaggaagtcagcttggctataaagagtagcatcaaggatcctgtgatgaaactctcctgtcctctgatgtgttggtggtcacatggttctacatgggtgataaaattacagagaactaagcgcacgtgcataccacacacacacacacacacacacacacacagagcagtctataaaatgagtacatgtaaactggtggaatctgaaatctgaacaaagttaatgggttgtatcaatgctcattttctagttgtggcattgtactatggttttgtaagatgttattgttgggagaaactggtgaagggaattgcatgtgaatctacatgatctcaaaacagggttttactacattgcttcagtgaatatccactgtgtgtgtcttatgcacacagaccaggttttccctagaggagatacctagaagtggaattgttagatcttaggatacacccaccttcactttttctagattattctctaacatctttgttcctatttacattctagtcgaactcatgtgaggtctaagttttctacaccttctctaatatttggtatagtcacaatttaaatttttttccagtaccgtaaaggtaaaaaaaaatctttttgccatcttagttttgaattccctgattcccagagggttaaagtccttttcttattttatcagtccatctgggttttctcattagtctcatattttactcttgagtggcttgtttcaaattaccacattttagaactgtttctgtattctagatcctggcctcacataggtctgtttctcctcatcttttagatatccacctatttttcacaatggtgactcagaccaacgcagtgctattcacagagtccagaacaaaagaacattcggaatgacatttttacgctttaatggctattgagtgtgagacattactaatagctttggaacatgcactcgtggttgttgctggcatgtgggagatgttgctgtggaaggcagcttcagtcggccggggagatcagctgccttctggctggcctgtcctacagacgtcccacaaacctggccagcccacctctgcataagccattccttgccatgagtctctaatgtgtatctccacctgcttctgtttctctggatgaagcctgtccactacaggttttgacagagatttaaaatctcctgtagagactattccagctactcgcctggcatttctgctcagctggcattagggcctgtggcatgagcactcttcccttaaacagctccagagcttccttcacgggttccaatgggccaacagaagtgtcttactacttaatggccacttatttaaaattatcccaagagtaattagaggccaggcgcggtggctcatgcctgtaatcccagcactttgggaggccgaggtgggtggatcacttgaggtcaggagtttgagaccagcctggccaacatggtgaggccccatctttactaaaaaacaaaaacaaacaaaaaaacgcaaaaatcagccaggtgtggtggtgcgcccctatagtcccagctactggggaggctgaggcaggagactgttttggatccagaaggtggaggttgcagtgagccgagattgcaccactgcactccagcctgggtgacagagcaagactctgtcaaaaaaaaaaaaaagaaaaagaaaaggagtaattagaatattttcttttcttttttattgacaactaagaaagctaaggagaagatgatgaacaaagacggatgacagtagccttatggtgaaatcattcttgaaaggaaacctgtgtgggacatctctgggtacactcactcatcattggggtggaattttaaaaggaggaacgaggagcacctttgcaaggcatccttctcaccacggcggtgcagagcagcagtcaggcgctggtgcagactccccggatggaatcccgcctcttcttgtgtgcccttagagtaacttaacctctctgggccttgtttcctcaacagtaaaaaatgaagatatgaataggatggtgacatccagtgagggcatcctagggccgtcccgactgttatccgaggtgacaaaccgctctcaaaagagagtctggcaacgtgcaagcagtcgataaacactcccaggcgacagaaaaggcacagaggcagctgctcatcttaagcatgtcatatttttaaagaacttggaggaggattaaaagtcaaacaaaataacttacaattaacatttacaaattcaggcagaaatagaaacatcacaagaaagtttggtctcttgttttttttttttcttttttccccagcgtttcgtggctacctttaatcagcgcacacagctaggaccaccactgaccaaactcaaacccgacgttttaaatcatggaggagccatgagctaccaggtgtaaaacaagcgacgtgtcttacactttcttatctttgggcagaactgtgatacttctggaggattttcaaagaggatttgaacaaaatagctttgtttaacccggagttagtagaagtggttgtttcagaacagttaactccctgggagttactccagcatttacagcaatttttaactgtgttcttttccctcagatttctgtttttcccacaaaaaaaaaaaaaaaacaaaacctcaaaaaacaaaacacacacacgcgcgcacgcacgcgcacacacacacacacacacacacacacacacacaccccctctgccgcggtacccttcccctggccttcctccactgaagggcggctgggttccaggctctcagccgtgaccacagccccggccccaaccgctaaggaggtgctcatcactggaggtggccgccagggagctcagtgcgggacctgctcaatccatacggtcccctgacttgagggtgaccgtccttaaactgtcccccggagcttcgccagataaaatgtccaaaacacacactggagttccctgacgtttccttcctctgaaaaactctctttccaggcggggcgttctgtggtcagacgaggcagaggcctccccggaacgaagtccacgccccctccccaccccagcacccagcgagcccacgcgcccctcacccacgcgcagagaaaccgagcacttgttgattctcacgttgttgcaattggaaaacggaacaaggaaccagagctcgcctgtttccagccagagtcgcacgggggtccccaaagacgcttgaaccttttcccaagccccactccaccttccaaaacgggggggctcaggtggacgcgaaaggacacaaggcgctgcccccagcaccccggaaaatctagtgtggcggcaaatgaccgcaggtcacacaccccggcctcgggggccacggaaaacggacgcacccggcccaggacaggcagtggggcccaggaggggactgccgggaagacccgggcgggccggcgggcggctgcgggcggcgcacgtgggcccaggtgggcgcagcgacgggcccggccgaagagcccgagacaggccctgcgaaggcggaagcccggacccgggctctcctggccgcccctggagctcagagggagactgcgcttcgccccgggggcaggggcaggagcgcgatcgcgcgcggggcccccggggtgtgattagcaggcgccgcgagccgggaggaccccccagcccgccctggcagccagcaccctctccacacccgcccagagtggccgcttttgaccgccgtcccctcccaccctagactcctcccctcagccccacggcccgaggccgagcggtttcagcgaccctgggaccgccgggcctggctggagtccacccctggacacctgtcagggtcgggccccggcgctgtaaacccgcgtctacacccgcgcccagcccccgcgcaatggggatcgggggcggcgacttgggttcgggtcagggaggccgccggctgctacctgctcggccacctgctccgctgcctaggttctccctgcgcgtccccagccaagaaagggacccggagtccgggcgtcgggatagctcctgtccccgatcttgcgcccccggctcccgcggggctccggtccggggtcccgcccaggtctccgcggtccccactcggaggggcacagagacaaaggcggcagagcagcccgcccgtccccgagggtcacccaccggcgctgcgctcgttgctccgaggccgaggggcgccgcggggtccaaggccctgctccgcctgcccaggcccgggcaggctggtctcggcttcaagcgcccacgcgcggggtccccgggcagcctgcttcgccttccggggtcgggagacaggggccgccggggccggaggctgcttctctctggcgcgcggcggcggtgactgacggcggcggctccgagggacgggcgcgcacccagctccccggccccgcctccccgggcttcctgcgagccaggtaaacacaggccgatcccgccgggcccgccccacctggacgcggccgccggcgccgccccgggagctcggaggaccccgggcccgctctgcccacgcggaacttggggggcgcacggggcccacgcgcagggtcagacctcggaggggcggcctggagcctcgcccgctgccgaactgggctccgaactgcggcccgtcgacccttcccgttcggaggcttggcctccgaacccaccccgaccccgacctcgacctcgcgggaggggtgccaggccgcatctccccgcgtcctcaggggctggaaaccccagaaactgccgatagacttggcgcagccccggccctgcaggaggagagtcagcccggcctggaggcgaaaggagccggcaggtcctcccaaggcactccctccctcccctggagcccaggccaggcccatgtccggctggcaggtgctcctctgggagctgggagctgggagctgggagctaggggcgcaccttctcctgcaggaccggcgcaggaagcgtgcgcggaaaagacagcaaaacacgcgcaggtgcgaggaagcagcctggtcctgcagcccagagacatcgtggtcttcgtcgctgtcttgttaaaaagaaaaagcctgctgtttagccgtgactcacctgcacacagatttagtggtcagagatctttctctggattctcagcctcctgatggtggaagaggaggaggttgggggagtcccagaatgaggccccgcgttcctcctgacctacacccccagtcagggatctggatctggagcttccaggggacctggagcagcctgggacccacacagtttgttaggaagtgagggagaggggtgagcgctgtcccggcccgcgctgggaggcgggactcagacttcagcacggggtcggggtttcggcctaaaaccagcctcccccaaagccccggaggatttagcaactgtcttcaaatgctggcaactggaagagaaatacttccacaacgacgcaaaagcattcagtctggtcgtttcctcaggagagattttcaagtggagggggcaggagggttctgagactttgaggctgaaggtgaggagggaaaagggtgccaaagatagtgtgtttctccaatttttctgccccacaacctcactttaagtcaaggatgagcggagtgggcgtgggaggctggacagctgccctaggagcacgggtggtgacaatgaacccgggtgcacccaggtcccagctcaagtcactcaaagctcaggctggggaagctggaacactaaaatgggtcccattttagatacctgctttagcatcagaaacagcttttcctccccaaaatatctcttggctttatctcagtgactccacagggcggggccaccttcctgcctgcagatgtccctgtgtgctgggctctggagcgtccctcaggccacag

SEQ ID NO: 357 - DNA, 469731 bp, Homo sapiens
  source 1..469731: mol_type = genomic DNA
taaagactacctgtattgttgggtatgactatcaaaggatttccggtgattcatgtttgtgaattggagtttaaatgtttgcaggattactgtacttccaaagacccactagaatgtcagctgtactctgtactctccactgagaaaatgaacaaaatcctatgtcttaacagttatgctctaactttttgaaagctttttgatgtaaataataggttagaaactaaaagccttttaatcttacaaaatacaatttgaacgatggaaggttgttcagatactggctttctgtaaaaacatcattgtgttagattgtttgtaatgtactatcaataaaattggctgcttgggcggttttagttaccaccttagcctggttttctgctactgttatttatcatcgtaggttctgagttgctcattgtggttgctctttggaccaataaaaatggcaagtatgagatgaacatgataaaagtatgtttatataacaggaagaagctgggcgcggtgctcatacctgtaatcccagcactttgggaggctgagttgggtggatcacgaggtcaggagttcgagaccagcctgaccaacatggtgaaactaaaaattcaaaaattagctgggcgtggtggtgcgtgtctgtagtcccagctacttgggaggctgaggcaggagaatctcttgaccccgggaggcagaggtcgcagtgagctgagatcacaccactgcactccagcctgggtgaacagagcaagactctgtctggaaaaaacaaaaaacaaccaaaaaaaaaaaaaaaaaacccccaggaagaaatattgtcgagagtctctgcaaaaatgaaaatacctcaaacaattaagtttgttgctttaaagcaagattatagtgtagggcttgagatgtgaattcattagatatttaaaatccagcaattcttaagtttgtgctagaatcaggttttgcaataggaatacttaactttggatctcaagggggaaagaaatacattcttttccattagagacctcagctatatgatagtaacttttattttaaattctcaaaaggagagtgactaaggtgttatacttactgtcaaagttactttgcttccatagtgaaaacttgagaacattgtaatctttctctaacagatgtgttgcaaagctgcttgccatcttgttgtcctatatgacttccttgcatttccagtccttgattacattccattttaatgatctttctttaagaggggaaaagactctcttcaatagataacttcctatttatgccaaattttaaaaagccaactaaaaatgggctataaatgagggttctttggccattttgatctaataatagtcttacttctagacccctgctttgactagggctcttgatttcatgtaagcatcatggatttgatatttgcctgcatgtatatcacagttctacagaaggatagccttaccctttaaataacacagttaaggtacactgtggaattagaaatatttattcagaatataagaatgtttgtaaaatattataaatgtctctgtataaataaatggagtttttaaaaaacaattctatatcaaataacgcaaagtagctattttacagcagctaaaactaaaggcatctggaaacatttaaagaatacaagtggagaatctaaaaaattacaaggtatagtacagtgttaagtagcaattttaaaatgagactttcagtacaaacagtagaacaatactgacaaatgcaaacttagtcacatgtgctttaataactgacaatacattcaagcaggtttttctaattcaagtgtatagcacatattcaaataataggaaacaaatctcatgcaaagtaaataaatcttgatgtctaaaaactgattagaactagaaaagaagtggacatgttttattatctttgcattacgttctaacaaaagcagattatcaggggctcttactcacttgccattcctgacatgagcactataagtgaatactatgagttctacaaacagaacatttttccacatgaatttgacttgcaaaaagtgcaaaagggaatggtagaaccagaattactaagtacggcatcagtgtgaatgtgggggaaatttgtgtataacttgctttgttctgctgagctgatatttcacctgattagcagatggatgactgtggaaagatgaagtactagtcaaggatgtggttttacatagcagttgctatttccgggactgaatgatttcttcctcttggtcacatgcaaaatctcacccagatgtaatgtgataaacaaacagtttacccagtgtaacctttaagcaaaaatgtatggtgatctgcatgtgaaactgtctttctctacacaggtattagcaaaacaagaatacatgaacagctgctatcaacttgtatactttttttccacttgtttatattttaacagccactgagagatcagtgatgctgtggtgacagcagtcagcattatttcttagagaatacaaatgtattaagttagagtaatttcaggtgtgttaaacaggagatgcttctgaaggccacaagtttggagcttactttaacctgacctacatgaacataagatttgtaggatgtggataaactttaagaactggatagtgaaggcgtaacttttgttttgtaaccagttacgcctcttctgtaaactctataagagtgctcaaaggtgaatcaaacttgtatatcattccttgtcaaataggctgttcccactggataagaaaatttgctgtatgttttcctgaaaaattttatagtgttctacaaagccatcaccttctgcagaaaaaaaatgttacttatgctccacctccccagccctcactaaaaactttggtagccctatggcggtaccctaattaaggtcagtgcagaaatctcaaccattacagaagtctcttactattttggctctcaaaatactctaactagtagctctgtttgctgaatctagaagtaggtagagctgtaaatagtttaatagaatgattgggacatactcccaattaagaatttgcaaattgtttaaagccttatggaggaaaggacactttcagagatgtttattttttaatagtcatcttgatatgttatcactttaaagcttgataatcgaaactcttgagagctattaaggttgactgatagacttaaaaagtgattgctttataattctcgtgggccataggaaacaccttcagaagggaacaagcaactatggaggttctttaattcatgccagggacacaggcagtccaatcttgatcgggtaactacggtgcacttttttctcatttaaaataatctaatctgtatccagttaggaaccagaagactttcagatagtttcatgttttccttagagtggtaactttctttactactccttaacagcttttaagaaaaagcctatgggctctaatttggacttccttttggagtagaatgtcaaggctctgacttagaagaggtccctctaaaatattgctgcaggctcagagaagacttagtgcatgcatctgaaaggagaattaagcaattttaaaagttaagtgctagttaaacataacatttgtttcaggcagcatggatattaacttcagaacgctgacaagccagccgatgaggatgaaagtttcaataaggaatcatactgttccccagtccatgacagatttttgtagctggtaagctcacactgatggcactcgcaactacggacagaagtctcttttgcttgtgatttgcacagttggttttgtttgcctcagtccaacaatgggaaatatattccaagggaactgtgaaatgggtcctttggctctgtgcccatttcttcaaaagccaaagactgaattctgaacagagatggttactgactaaaagggggtaaccactgaggaaactagggagaacaattcaaaatacgaaatctgaaggtttttaacctcatataaattagaatcaagatcattgtttaccctcattggagatgtttgttagagaaaaattcaggtagcgccaggttattcacaaaggaaaattacccaggaacctgcaagcatttaatttaatcagtatagtttagttcagtagctcccacaattagcataatcaagtgccacctagttcaccttcaaggattgtgtcttggggagtatttgaaaaatacaagaaaaggaaaaacttttatagcttttttattatacatatttataaaaaattaacacttttgcctgcaaaatagtttttacccaaatcacatttgaaagtactaaaactaaggtcaggtagcatgagtaaaactggggcccttaacaggagctggagccgcctctgcctgggggaattctcagagaaggggaggttctctgattttacctggagcaagaatggagacagaagtcagtaggcaggattttattcctgcttcagccacatgtttctgtgtcagtgaaaatgaaaactgcccatttgatgcctgcttaatcacaaaaaagagccatgcacatcccactttgctcaggggaggacgtttccctaggcaagctggaaaaatagtgaaaactgatttttttttttttggggcatatgtttttcagccaaaacattttcctcatgataaaatgcaactttatatgaaaagtgaaaaattctaaaaaatcacaggaatggccaggcacattggctcatgcctgtaatcccagcactttgggaggccgaggtgggtggatcagtggtcaggagttcgagaccagcctggccaacatggtgaaaccctgtctctactaaaaatacaaaaaaactagctgggtatggtggcgggcacctgtaattccagctactcaggaggcagaggttgcagtgagccaagatcacgccactgcacttcagcctggtgacgagcaaaactccatctcaaaaaaaaaaaaaaaaaatcacaggaactaactttgaccaaatgattgacagaaaccagtgaacattttcatagtgatcaaagcaccccaaagctggtccttctagactgataccagttgatctgttgtttcgttttggagatgggcagcctcactgctggcctctcagtggttgcttttaggatacagctgtctgccctccgaactggtggctggagtatcctccagcgaacagaaggctgtggaatttgtatcatgctctgaaaatagacctacccgtagcttatggacataaagactctatgcagaaacctcctcaactttaatttgtagtcagctatggcaatggaacacatttttcatagggaactttggatggattctctggtgctacagaaaaaaacagtaaatggtccttcaagtgtatcagtgtagaactgagagagaagaggtaaaactgaaaaagaataatgaatttgttttaagattgaagaccttcctgaaataattcagttactttggtactgcctagccctgtaagcattttgcttgaaatttaaccttttaagcaccatatgctaaccatcaccatgtatctgggggcaaaaaagaagccttaactaccattccctcactctgtccccgtcatgacaacaggagctaagtcttgaactgggggttacacagcactcttaagtaggcgtgataagttttgcaaaatgttcagtatctcctcagtgtcttgtccttaggtagagacaggtccagagctacaaatgcacccatgtggaagagatttgattcagcagaacagcaattatgtagtgccctggggcgggaagtgctaataatgtttctcagctcttgaagaaacccctgacagaattttagttccactacaggtatcaaaaagattcccagctctaagtcttggatattaataaggctccactgagagggagaaatcccagaatcaagagagcgctcccttcccagccctgcctccaaaatgaagattgaaggaagtttttattctctcaatacaaaattgttcaggcacagtcctggtggtggtctgtttgtaactttagtgtatctgggactgtaagtaacacctgtctacgctcttcccatgacctataactcccagagatcacctcttatggccgcctctatcttaaagttgagacccgggacttggaaaccaaagccttgctgtagtaaacaaatcagcagtccttttaaatgctggaggcacacacaggtctgttttcccatgaagcaggaggaaagaggagaaacgagattctagaagatgagcccagcatctaccaaaaagaggatacaatggaaaatcttacagaaacaaatgtctgggatcccactgatgcacagccgccagaccagaagaggagggggagagtgagtgctgaaagcagaaacgaggctctgctgagcaggcacagaacatgtgtttacacgctgttgtgggcccaggagggaagagcgggcacctctggatacagtccacaatgtcaccatggccagtcgccccaagggttgagttggggcactccattgtccaagtgccgacctacctgccagccttccctttcctcctcctcccaacaagtacatgggcccttctgtccccagtggcctgctgcagtttacttcccatgggcagaactccggtgcgtgagtgctgattaaagcgaagtttcattggtgtgtggcctggagttctcctcctctagcagagctattctttgcttgagcatcctcacttgggtctcatgtctctccaccatggccatcatctgcgactctaacttcttcagtttgttttgatgctttttctttgctttctcataggcagccaccaggttgctaggtgggaatgaagggaaattggtattaagattcatcctaagtagcatcgtgacaccatcctgtccactggataaccagatctagtgagcactgctctgaagaaagatcactcatcctcttcggtaagaatctgaaatctagtggtcagaggagggacagcaccaggatgtcaacactcaacggccagtcacctactggcttaaccctgatgaatccagccggattgctagaggctggtcactctcacatattagaaggggttctaagagtcaaaccagcaatccaaattggcccagtccaaaacggataaatacaaatagtgggtctatttgttgctccatggttgcttgcaacatagtcaagtgtatcttacaggagagtactcctaaggcactgcaatcaaagtgaccatacctgggacgagagcagagaggttgttcttgttccaccttccctttatgctttgggctggtgggactcggaatattaaattaggccataagccaatgctgcaaagccaaacatggaatatacaggcctttgaactgttcccaccagagcctggtggtagggtatacagtgagcccaggtaggtccattccatgtacagtcattacccttacagctgcagttctcccagatagtctgaggactcaccccagagatttgtaaaacccattcaggaggtctgtgaggtcttgagcttttatttccaactatagagctggatgatgccaggtgttctcaatatacatccacataatgttgactacagaagcaaatgtgagaacctagctgtcttctattaagccagacattaaagatttgcagaattgtaagaccagtgccacttttctaattatttcttggaaaatagtttttcataaaaatgccatttttttttttgtaaatgaaataataaaaactttaaataatttatcttggttttagttctaacatgagaagtatcaataaatacaacttacaggaacaaaagctctctgaggtcctccgttttttatagagaagagtcctgagcccagtcttagagcagtatttcctgaagtattccagtggatattgtgttgctcaaataaattccatggctaattttgtttggaaaatactggcttaaacagattttttattatatgacttctcagaacatttaagatacataataccaggaggcatataccacagtatgctacatttggccaaaggatgttgttactgagcatttcttagtttccacagaccatcttgggagatgccactctaaggaagaccaggctcttagagagccaggtagggactcacccactttctagagttagttcttaagagttagggaaatgtccatccctggtgctgtgtctacatgcagggtgtcagtccaagtaccacaggtggagggcggtgggggctgggtatagggagatttttacctgttggcccgctttagatcattcacgaactctgcagattgctgatgtcggatttcactgctcttggtgagtctctccaaggcactcaccagctcttgaactctggccttcaacttcttttctctatattaaaggagacaaaatatgccaggagtagtttgagatgatgctggaggtgcccactccctgggaagtggtgacagaaagaggaaggtttagcttgcaaagcctaaaggcaagggagagaaaagatactaaagggcccaacagcgctactgtcacctgaatgaattcattctcaaatgcagatttaaacccatttcttcaatgacaagggctttttaaagatcttatgtgtcaaagaaaacaagacaggaatttctgtttctagtcttctagctaatctagaagttcctttctactattggcataccagatcctcagcaatgagtgcggcctgaccacaaacccccgtctgtctccatccccttctttttcaggtgtcctaagtatctcctgaaccactcaggtttagcaacctaccttgaacaggtccccactcattgagaccaacatgatcccaccttgccaaaaaccaaaaaattggtagagggagtagatatgatactctcttcattgtaagggtccttatttcccatgaaattacatttgcacttttgactacgtgccctccacaggcaaagcagcttcaagttctgtggatcctctactactttggtaacccaagctaattagagtcagttcagggaggtttccagtatccagtcagctcattgccttcctctaattcccacaagacccagcagggaaacactaatcaaagccttctcgactactctgactcccttccaagatccttctatcacatgcacagtgttactccacttagtagcacactcagcactatgtcaccgtattacgtgctggagccatgacgctcccccatggtcatgttgggttctagagtggcaaggactttacttggtttgattccccaatgcacccccagtgctgagcaccgtgcctgggtgacagcttctagtgactgttaaaacagctttagaacaacttactgaaggtaatgtatttgattctttgggcatattaagaaaccaggatttagggaaggaattcgtttaaaaaggactcactgtatgtagaatgtaaatttgcatgattaatttataagacagttgggtaggatctagcaaaataataaatgaacatgccccttgactaagcaacttcacttctaggaattgattttacagagatatcaggagcacaggttcctaaagatacatcacttatatttggattcacttaggcattggttacaataatgcctaataaagggagacaagcagggaactggttaatcacggcctacccatgctaccgaaatgctctgcttgaaaaatatttttaaaatgcagatggagggctgggggcagtgactcatgcctgtaatctcagcactttaggaggccaaggaatgtggattacttgagctcagaaattgaagaccagcctgggcaacatggtgaaaccccatctctacaaaaaaatataaaacttagccagatatggtgggtcatgcctgtagtccatgctactcaggaggctaagttgggaggatcgcttgagtccaggaggtcaagaccagtgagccatgatcctgccactgcactccagcttgggtgacggagtgagaccatctcaaaacaaacaaaaaaatcagatggccatgcactggcatgggaggatatctgatacattaagcaaaaagggtgagttctaaagatgccatttttgtaaaaactgaaaagctgagtgtgaatatctgacactgtaataagactagaaggtgaaacacaaactcaacagtgcttaactcctgaagggggttgatgggaggctttcattttctacttcactcacttttgcattgccagatatttttacaattttgtatattttctgtaaagtgcgagttagagtcatgtaggaacggcatgggaatgtgacgtcggggtagaaggctcctttctgctgcccaaactgttcagaccctggttctcctttcctagcttttcatatatctaatcttttacatttctgcctttagctactatgagggtaagtcaagctctccaaactgatcaatgaagaaaggaattacaacgtaaaatccaggcctgcttttgggagagaggatggaaggggcaggatctttaagggaagtctagcaaccagccctcagcccagaactcatttttcagtaaatcctcctacccgcctctgctaagctggaaggagcgtgtgtttttcctgggccctagcagcctccaggacatctcggatctggctgcatttcctcccggcattggagagtggcagcatttcctaccagcagtgaggatggtgttgcaggaggggggctcctttcctccccacccgccccccaacacctcctcggccttcccagcagtcctcctccagcggagggaagccagggactcctgcttccctccagctaaaaacagcagggaagggttttttgccctacattttattaccatttagagccctttatctttcattctaatgttgattaatagtgtaaaaggaaaaaaaatactgaagagttaaaaatgtaaccacaaactcaataagaaattcacaacaaaaaactctgggatgctacctagagcagtcaaatcccctccctcccccactcctatccacactcagtgaacagggagactggaaatcccagcccttccacaagacaaaacgcttccttccccagcacccaggccctcaggggaccagagggaactttctggatctggcaggctccaaaggaggatagaaccccagaagggcaggagagagtctctcagacccaggccaaccccagcttagggttgtggcgcaggagtggggagtagccattgctgggagcttagaactgcctggccttcagaagggaatgggagtgaaccgctgggagaaaccccaggaaagaactatgatgctcatttatttaaagatgcaaagacgaggccaaactgtaaacttaaacctaaaatttgggttggttgatctgttttcatgacaacacaaaaaaatgtaaaatatctatttagtttaaaaaatactgattacaggggccgggcgctgtggctcacgcctgtaatcccagcactttggtaggccggggctggcggatcacctgatgtcgggagttcaagaccagcctgaccaacatggagaaaccctgtctctactaaatacaaaattagctgggtgtggtggcgcttgcctgtaatctcagctacttgggagcctgaggcaggagaatcgcttgaacctgggaggtggaggttgcagtaagccgagatcgcgccactgcgctccaacctgggaaacaagaatgaaactctgtatcaaaaaaaaaaaaaaaaaaaaaaggatactgattacatgttgagatattttggacatactgggttacattgttattaaaattaatttcatgtgtgtctctacttttttcatgggactactagaaaatttaaaattacatacatgccttgcatttgtggatcatattatatcaccagtggacagtgctgctctagaccaattgtttaatgctgtcagaggcatgtgaaccagagcaactccatcttaaataggagttaggtaaaagtgaggctaagacctactgggctgcattcccagatggttaaggcattctaagtcacaggatgagataggaggtcagcacaaaatacaggtcataaagaccttgctgataaaacattgcagtaaagaagccagccaaaacagcaaacccaagacggccacaagaatgacctctaatcgtcctcactgctacactctcaccagcgccacaacagtttacaaatgccatggcaacatcaggaagttaccctataacgtctaaaaaggggaggtatgaataatccaccctttgtttagcatattatcaagaagtaaccataaaaatgggcaaccagcagcccccaaggctgctctatggagtagccattcttttcctttactttcctaataaacttgctttcattttactctgtgggcttgccctgaattctttcttgcacaagatccaagaaccctctcttggggtctggatcggtaatattttccagtaacagcattaccagatattttccctggcttctgactaagtaggtttcggttgagacccaggaattgcagtttaacaagggccccagctgactcttgtcatcaggcaagcttgagggactggcgtaaggcagaagagttcctcacctggacctgaggatgagcttcagttactcctggaactgactttctgaatttatatgcaaaattgcaagcacggggctcactttatcaagtctacagttttcctcagattttcaaacgatgacatggaaaatgcaaagaaacatagcttactaattcaagtcacattgaaacctcaaccattcttgttcctttctccttctaatttaaatttgcttagcctttcgttaagattttatatggtttgggtacataagttaggccaaaacaagctttcttggcttcacacaaatgagaaagcaaaaattcaacactacacgttccatatgcaccttcaatagtaatgtattcatacagtgtttcctggaatggccagaaatacataatccattccttttttatgcccagtagtattggcactcacaaatataccccatagcatcaagcaaaaacaatgctggattgtaatgactgtgacaactgaagtcccccagtacacacatggatttcagttccacgtcttcccacttcagcttttgggcttcttattcctggtgataaaaggtcgtatgactctaaccgcagagccagggtgggacttttaagagacagggtcttgatctgtcatccaggctggagtacagtggcacaaatcacagctcactgcagcctcgacctcccaggctcaagcaatcccctcacctcagcctcctgagtggctgggactacaggtgtgtgccaccatgctgggctaatttttaaaacttttttttttttttttgtagagatagggtcttaactatgttgcccaggctggttgcaaactactgggctctagtggtcctcccaccttgccctcccaaaatgctgagattacaggcctgagcaactccacctggtggattctttttaattgaaacgtaatgtggtacgtttcaaggcagtggaatatacacagggaattaagaggcagcctcgtggtgtgaatttaaaggtaatatgaaaaccaaggtggcttgccagtacgctgggcagagcgaagcaagcctcggaagtggtgcttgttggtgtacctgggtagcctggcagtgcggcttcgtgagccatcagtaaggaggttatattctccctaaaataaaaaggccagcagcggtactctgtgattagagtccaattgaggagctgcaggagtcatcgggcgagagcccagtctcaatgaggctgtgagtggcttcacagctggccaggaaacctttcagaggagctgtaatcagaccaaaccacagggagtcacagccatgcagccacaaggcctagaatttcttagtaattgctgattatatggaattagtcactaagagaattgtctgcatatgtgatgtctctcatcctcaccttccatttacttttaacccgtcaggctctgtctccactgacgtggatcactgagctcaccagtgagctccaagttgttgcatccagcggtctggtcccttctgtccttttcttacctgcccgcatcacctgcagggctgacagcctctttgctcatggcttgcacaaggcctccagagcctgatttcgttctgcttcattggctgctccctttctatactccatgacaaaatactgggtgttgtttaggacttgggcctggcctgtattttatcttatccttttctctaatggactccctccattcccttttcctaaaaacttccacactcttaatcttctggcctttccttggatctctggacttgtctgtttgcggcctcttaactggcatctgcgatttcacatgtccagaggattacttcccagatgacctccaacagccactctctctcctgtgttggctaatggcaccacctttcagccagtcactcattgggctcagatctctctgccttcttgcaaaggcagtttaagttacttggagtaagccttaactcctcctcccctcatccttgacatctgttcaacagcaaactctatctgccaagtctcatcctgccattgtcaccacacccaggtccaagtggtcatcacttctcacccggacaaccacaacagcctgctaactggtttctctgtctcctcccctgcatccctctgccctggttttcacacagcagcccaggtaacatttcacatgacagatctgatcatgttactgtccttcactgcctttcacctacacgtggaataaaccctgtggtcttgcctggacctctaaggccctgcttgacctgagtgctacttgctgggcctttgggctgctggaatcacccttgccctgatggaatcctgtaggtcctcaacacagccctgcacagccagggcctcttccggatatgattctgcctctctcctcctcatctcagcttcagtgtcacctcccagagaggcctagactgaccacccatctaaactcatgtcccagagctaagacatcaccacgccttaccatttccttcatattattcattgcaaactaaagttactttattggaaaaaaaatctccacagtgactgtatcacatcatcccgtttccttcatggtaatcaccacaatgtttacttattttttagaaaatccaggcagcagataacagctgtctctaagtcctttataaggataacatcatttcattcccacataaccttggaagtcagtactatcatgattctcatttttaaggatgaggaactttttttttttttttttttttttttttttttttttttttttgagatggagtctcactctttcgcccggtctgaagtgcagtggtgcgatcttgggctcaacacaacctccaacccctagggttcaagtgattctcctgcctcagcctcctgagtagctgggattataggcacctgtcaccatgcccagctcatttttgtatttttagtagggacagggtttcaccatgttggccaggccagtcttgaattcctaatttcaggtgatccacctgccttggcctccgaaagtactaggattacaggcgtgagccaccgcgcctggcctatagatgaggaacttaagattagtccctgcagaactgggactcccacctgggattctgtctgcagagcctgtgcccttacgcatctcactgggtagtagcctgtgattcacaaagggaatacagtagagtgcaagataaacaagacctctgcttaacagtgcagccctgcagaactaaggctcaagtgtccccagataatgaggttctgcaggtatgtcggtggctgtgttttgccaggagtagcagcacaaggacaacagcagtctaacttttttttgcccagactttgctatgaacatgtttcttgtccaggaaatccatctggagttttcacaggccttgccagtggctgctgggtgttccagtgccctctaccactctgcctttatgaggtcccaggcaaggccttcttctctttgagctttggggatgctggagggatggcaaaaaagtaaaataaatctcaattactcaagcaacaacccctccatcccttgagtgagcctcagtcttcaccctctgtgcttctaggcacttggctctggggctcagcagtttatttgcgtgctaatgaagccacaggcacactttgtattccattaatgtcctgcagacccatgtgcttttatggaattctaagcacaacttccattgcttgattgcttttatacatcaaccaaatatgaagaatcagcaagtttaaataaaacagcaccttttacaataatggtcctcctcatgaaccagtgaagattctgctgcttatttgttcagtgggggctcccttttaaaaagcaccccacccacttcccttttcattttatcccactctttgtgtggctcaaaaacagtattcatccacagctgctgaaataggggtcaactagggtcatcctttttccattcagggacaaatgttggttcctacaagtctggaagttttctacagttgggtggatggtgtatgaacttggacatggatttgaactctgaggagtctcgctggctttttcgaaggcactggtaacagtcaagggctctgtgggccactgatgggtaaagagtagtcagggccgggcacagtggctcatgcccgtaatcccagcactttgtgaggttgaggcgggcggatcagttgagcctaggaatttgagatcagcctgggcaacatggtgaaatcctgtctctactaaaaatacaaaaattagccaggcgtggtggtgtgcacctgtagtccaagctacttgggaggcttaggtgggaggactgcttgagcctggggaggttgagtctgcacagagctgtgattgtgccactatactccggcctggatgacagagtgagaccctgtctcaaaaaagtaccagagaagactcagagaatagcgggaagatacatgatggaggtgactgaaggaagcttcaagatggtaagcattctgattggaaaggatgagggagaatcagggataaagcaaagggtgtgctcttggaaagatgaattgtccagaggggctggactacagatcaagcatggggaaacatttgaaatatgggctaggaagttaagttagggacctacggacaatcttgagtgccaaggcactgaaggtgcttatgcagagcaccctaatccgaagtgtgttttaaggtattctggcggcagaatcaaactacagaatgacccattaggacactactctctgggttctgagggtcagtgcgatggaaaggaatggaagggattttaaggaattatgacctgctgacgagaggtagggaggggagacttacaagttataatcctggatcattaggagaaggggatttttaacataaataggaattcatcaaagggcaggaagaaacagaattgtattggatgtgctgttttgaggctttagcatatttgggtggagatgtccagtgggcatgaggttgagataatttagggaccatttagaaggaacagctgaagacatgagagttggagtcatgtacttggctgagtaaaccacaatccctggccctaaaaggactctctttctgtgtggggactgagggttaaggaggggagttgggggtagaaccaggcatattaagaaatgagcaatgaaatgttccatgggagaaggaaattcatggcgctaggaaccaaaaaagaagtgggagagggtgtcatttctgctgggaggtggaggatgggaacatccggatccattttacagatagctgtaagtcacctgatgtgaatgtttggggaatggcattgggtggggccaggacaaaagcagatgcaagactgaagccccagaggcgcagaagaggaagagcagtctcacggcaggtgtgatcgatcacactgaccagacaaggccctcctgccactggatatatccttacagggctctggcacacaaccctgtcttccagcagtggcagcttgcctacttcttattcagcagagaggggaaaggaagccctcttctggtggatgagtcaggggcatcctgtccctggacagaacggccactgtgatttgtcgattgccttaacgtggcattttacagaaccatctggcaaacacgcagacacagatggcatattccagttccctggagggctgggcacagcccctggatggtcggtgactaaatgaccgcagcctcctggagggcagggcgctgactcctgcaggtagtatgtgaggctcgccccaccctgctcctgggtagagtgaaaggcgagtgcctgtgaggcagcaccatgctctgctcctcaccatggctcaggtgatgtatcatggtgaggagcagcgcacctacttcctgcctcccagcactgaggaagcacagatccttactttaaaaagatattttttacttatttattttttaaagacgagatctcgctatgttgcccaggctggatttgaactggcctccagggatgctcctgccttggcctccccagtagctggaactccaggtgtatgcaacagcacctggctcactcagatccttacctttttatcagcatgacttaggctgacatatgccattgcttcacagctctgtgtgtttaaggaagtccgcctcccgccatggcacctcatttgcctttcgcactgacagactaagacatggctgtttactggaggcatagaggtttctcactgcccagaccagccacacagcaggtagtcttcagataaacgagtgggctcagctcactcatcggcaagcaagcccaatgctgccagcacatgtggggcacaaggggtccccatagagaatgtagaaacatgcagacttccccactgcctcactgtgtgaccttgagagatcactcagccttgccgtcccactccgcgcccccccccccaacccaccccaggatcacatggagagcagcacctgctcccggctgcctcccaagaatatgacggagatgaactagtctgctcctctcagctgtgcttgggtcccgagggcgggctgcacaaacaccatgtgagtacaaaaaaggagtcatttctgaaaattcccttatttagctgcctttttatagatcacttacttggtggaaagatcagtcaaattttactaggaccaagggtgagagacagatctgagatggagaaggtttttacagcacacaggctggatggacaagagagaaaacaaaataccctgttaagaaaacatctcgtgtgccagactggaaacctggtcatccagatggggttttatggcaataccacagccaacaaactgcaataaatgttcaccgaagtagggggaacgaaatcagaccagatgggagttatacatacagtaaaggcggggtggcatgtagccttggttttgttccaaacagaagaaagttaggagaagatacactgagagagccagggctgagtgacaagggctggccaggtaaggggaggttgggttggggacagtgtcatgacccagaaccagtgactgaaatgtcacagggcaccttccctgggatggctggttctccttaaggacagcccatggcttagcctcttcctcttcccttagcgacacctgatcttttcagtctggatgcctgcgcctacagttttggtgtctggcaccatccttttttcaagggagaaatactgctgaaaatgctggtaagattcccccagctgacctcaaccataagctcggctgtgatttaataccttcaaaaaaggtgttcgtttccatttgattttttaaaataaaaacctcaggaatcatttcatcaaggtatataatacaaacccaaactgcagccctgaggtgtgtatattgtatcccctcatgaagtgatgaccccagtttctaagctatatttacagtatcattatgttattttcctttttcctttacctctgtaagtttgttcttggctccatccacctgggtcttgattagaaatccatgctaaccaacttaaggctggttattggaaatccattgtgactgacagaacaaatgaagtctctttatgtttagtcagcacaatctgcatcttccttgtgccagcaaaggcctctgaggtttggggaatttgaaaaacttaagggcttagcttacagatacaatatccaaatggctcccactggaaatagcgagtgggatttccatcccgtgtttctggcacagttaagtcattaggatttgttgagggcatttttctgcgcagcttttctcttcccgccccaagcagagcaactgccatttaactgcacggccagaggctctggcaaagtacaaacagagctattacaacttggaaggaaagacaaaaagtgacaataaatcaggaaggtagtgaagttccccacaaggcaaccttccatccaccatcagcttggaggccatcctataaacaggcccgctggatcaagtgagctgactgaaaatacactgtacccttcccctccaaccctaaatccccagaaatggcaggaaagacattttttaaaacccctgagcatcttagaaaggagtgctctttgtatatcagaaatcatgctcaatcataaaaaatgaaaggcagatgttttcttcttcctgaagagaaaaccacaatgcaaaatgaatgcagaaaaatattctgcaaaaggaagaaggggattcagaggtgctccaaccagaggtgttggctaccagaacaggaggggaccaaatgcttgggtcagatacgcagactagagggctgttattagccaggagacacagaaagcccaggagacagcttctgatatgacccagctgacagcactttgaaggacctggctacattttctgggtggcagactgtaataagtagaagcaggactctcaaatgggatggccgggtgcagtggctcatgcctgtaatcagagcacactgtgaggccaaggcggttggatcacatgaggtcaggagttcaagaccagcctggccaacatggtgaaatcccatctctactaaaaatacaaaaaattagccaggtgtggtggcgtgtgcctgtagtgccagctaacttgggaggctgaggcaggagaattgtttgaacctgggagaccgagattgcagtgagccgagatcgcaccactgcactccagcctgggcgacagagcgagactctgtctcaaaaaacaaaaacaaaacctctcgaacaggtgacctaggaatttaaaatacaagaatgaacacacaaacaagaaccgctgaatatttaaagaaagcaaacaccaagaaagagtcacaaaactcaactatgaaaagaattacatgtgaagaaacagaattaatacagcagacaaaaaagatgaaggaatttaagggccgggcagggcactgcatgcctgtaatcccaacattttgggaggccaagatgggaagatcacttgagcccaggagtttgagaccagcctgggcaacgtagggagaccctgtctcaaaaaaaaaaaaaaaaaaaattagccaggtgtgggggcatgcacctgtggtcctagctacttgggaggctggggtgggaggatcacttgagcccaggagattgaggctgcagtgagctgtgattgtgtcactgcactccagcctgggcaacagaatgagaccctctctcaaaaaaaaaaaaaaaaaaaaaaaaatttaagcattataaaaatcctcaaagagatgcatatcactaaaaaagagatgacagatttaatcaccaaaataactcaacatataggtcaaacatcacaatgaacctaactaaagaataaattagtgagctggaaaatttagccaaaaaatctgtctctccagaactgcaactatctgatagggcagccacaaccatatgtggctcttgagaacttgaaatgtctgaatttgagatatgctgaggtgtaaaatacataccaggttttgaaaacttggttaaaaaaaaatttcattaatagtttgagaaaatattgactatatgttaaaataatgtagacatattatgttaaataaaatgttattaaagggaatttcagctgtctttgttctttttaatgtggctactagaaaatttacaagtacatatgtggttcacattacatttctgctggacaatgctgctgtagcacccggggaaaaagcagtgatggaaagaaggtatgaaaagtggagatacggaagacagagctagatgaatcagcatctgtttctccttgcaggaggagataaagaactggggggcggtgaggggaaagaaacactgaaataatagaggaaaatttcccagaactaaataaatacacaaagctttttcacactaccaacgctgaaggaaagtattcctgctgaagttggaaacaaggtaagagtgcctgttttcacctcactagttaacactgtcccggaagtttctagccaatgcaacaacataacagaaaaggaaaggaagaggaattttcctattcactgatgaatcaatgactgcctaagtgctgtctcttaagtgctctctcttctcactgttttgaaaggcctggcaccaacaggccttctccatttctggcttccaagacatgggtaaagtggaacacatcagcaccttctccttttgggagcagcaaagagaactcagaacaaagtctccatgcccaggataaacaccagctggggtggggaaagggtgcttaccgacgaatggcgttggtgaactccgcagccagctcattctcgctgcacgttgtcctgagttcggctagggacagagctggggaggcagcatcagcacactcctgacaacagcaaacacattccagttaggcctgaatccaagccggcagcaccctggaagcctgcagcagagcgcggtaggtggctcgtgcagtgatggcagcagtgtgggcaccgggtggcgccctcaggtcatgccaaaggggaaagcctggcagcaagccaaagaggcccctctgctcccagaccgctggctccttttgcagactggccagtgcggtggggatgacacccagtatgctctgagcagccgctgatgccaggcactggtctaagcatgccatatgcattcaatcatttaatctccacaaatactctctgaggcaggaactatcattatctccattttaccaaggagggaatgaaggcacagagaagttatgcggcccagtcaccagctaggaaatgggggaaccaggattcaaacccaagctgtgtggccacagatcaatctcttgaccgctaggtaaagcctcttgtaatcatacaagacaagtgagaaatacctgtgaatatccttggtgccccatcccacgtctccttgggagaaaagcaaactcctttagatttaggagccttgctgggttcagtgtaatcatcaagaaaacccagcagaggaggaggaaaacagaagtgcagcccaccccatggcttagcattagacagggaccttgacatcatctaaagcaaatcatcccaccctgcagatgaggaaacttaagagccagtgctccaaatcctatagttaagactattcaaagcagtgaccatgcctgagtgctctacattccatgcacagagaggacagcagccacactacatagtaccatggctgggggaaggcattcatcggatgatctctcaacggacatgagtgctaccaagctgcagacctgagaataaaaagcttgtgatctgttgcaggagatggaatgtaaacagatatttttttgtttgttttttgagatggagttttgctctcgttgcccaggctggagtgcaatggcgtgatcttggctcactacaacttctgcctcctgggttcaagcgattctcccacctcagcctcccgagtagctgggattacaggcatgtgccaccacgtctggctaattttgtatttttagtagagacggggtttctccatgttggtcaggctggtctcaaactcctgacctcaggtaatccacccaccttggcctcccaaagtgctgggatcacaggcgtgagccaccgcacctggccataaacagaaaattttataagatatgagctacagagaggcacgaattcagtgctgcaagtccaggcatgtggtctcccgaggcagttccttggcagtggcactgccaacacttgagtgctcttccctctgccatgccctccacctgggccgccttccacctcctctccacctacctgcgctcagagatccaagtcccctgtccacccttggaatctgttgagattcccacaataccctcactttttgtatatccattcccatttgatgttaacatttcgtgagactccttaaagacagggactgctctgtctcattcacggtgcctctcactgaatatacttggcagtatctggtgcacacagacgagaatttcaaaacctaacgcaacttggataagatttggaatccagctgtgctagttggagggaagctttttaaagaagcataagcacccacccagtggagcaagaaaaaaggttcaagactcaaatgtggcccgccagctgctttttatgacccacaggataagaatggttttcctatttttaaaatcattttaaaaagtcaaaagaagagtattctgtgacaggtagaaattatatgaaatttaaatgtcagcatccatacataaagtattactagaggccaggcacagtggctcacgcctgtaatctcagcactttgggaggccaaggcaggtagatcacttgatgtcaggagtttgagaccagcctgaccaacatggtgaaaactcatctctactaaaaatacaaaattaaccaggcatggtggcgcacacctgtagtcccagataattgggaggctgaggcaggagaatcacttgaacctggtaggtggaggctgctgtgagctgagatcgcaccactgcactccagcctgggcaacaagagtgaaactccatctcaaaaaaaaaaaaaaaaattaaataaagtgctactagaacacagccatggccactggtctccctgttgcctctgcttttgcgctagcattggacaatagcaaagctgagtggctgcagctgcacccaaatgacccacaagctctacaacattcactgtgtgacccttcacagaaaagtgctgaccccttctctagatgctcgcctcatccagcaacagctaagaccagatgaatagcccagatgggagattttattccaacagtaaatggatctagtatttgaaaggcaagataatcagcttatttcattacctgaaaaacacaacatactcttataaaggttcttactgtagtgttaaaaaaaaatcatctggccttttccataggataaattttcttactttttttttttgagacagagtctgactctgtcgcccaggctgtggtgcggctgcacgaccttgggtcactgcaacttccgcctcccaggttcaagcagttcttgtgccgcagcctcccgagtagctgggattacaggcgccaccaccatgcccggctaatttttgtatttttagtagagatggggtttcaccatgttggtgatgctggtcttgaactcctgacctcaagtgatccacccgcctcgggttcccaaagtactgggattataggtatcagccaccacgtccagccaaatttccttactttgaagccactccacataacagtatttcacccagtcaaaataaataccaggaactaggggaaaatgctcagttcatgggccttctggcaagaacctggtaactccattcctaccacaccccaagaacacacacaaacactagcgctctgtctctaactgactgctaacaaactcaaaaggcaaaaaaaaaaaaaaaaaaaaaaaaaagagagagattttgaaggtgtttgtatggaacctcatcttcccgagccccagatacttccatgtgaacccagatacagtaccgcatggctgatgcccacctgcacagcctgactcacctcccccagccttgggcagatggcttcatagtgcacttggcatagtgacttctctaaagcccaaactgtatcacatcatctcttgctgaggacccttccatgattccgcacggccctcaagataactccagccagtgcatcaactccacaaccctccgggccattaaacgtgctgtcccatcagcctaagggcacctcttctctcccctggccctccacctgcccctcttcaacaggctacctcccactttccactggggctcagctcagaagttcatttcttccagaaaacctgtcctgaatctcccaagtggacatttgtgtctggcttctgtcctcccatggtgctaagaattcagcctcgcactggggacattctctcactgctctgcgatcacccatttgcccaccagtctcctcctaagaatgtaaattcctagaggacagactgcctgtctaccacagagctgcctctagcaccctgccttggttctggcacgctgtgagtgccaaatcacatttatcagctgaatggatgaataaaaagcagccagggtcttgggagggctggcctggctgggtgccacagctgtgtcttgtcttggctcctcagcaagtgggaggtggagaagggtgtagctgtggccatttgtgaatcatgcttcagagttcttaactatgtagggagtgacaattcactgtcacatgacatcagtactgttccttctttcccaggtatatggctctcctggagacgatcctgcacttatgctatgagaagcagcttattagactagcaagttggcatatgtctgcgagtcctgggtctgaaacaaatgggggtcaagagaagcttgcatttattaagaacagaaaaatatgatgcacagaatatagatgacccttggacaagggatataattctttagagtccacagttgtttttttcccaacacagtatttggaaaattctgagatacaggataatggaatgaacttggattccagaaaaaaaaaaaaacacctgggggctgataaaagagtgagtttgcaaaattctatcaccagacagcctgctttcagatgatgtggacttcgtaacccaaggcttccttcctcctcctctgccggcaggctgattcctgcttaccaccctgtgacggtagcaacgccagcaggaaggagtcaaggaggaaatgcagtggagagaagagagcccgttagtggatctgggctaaatcccaattctaccatttatcagcagtgagactcctcacttctttgagcctcatttttctcatgtaaatggggataactattctttcctcagacctgtgagacttaagggcgataataaatgcagtcattggtacagaagtactgtagctcccccttaactgcagttttgctttctgtggtttcggttcctcaaggtcaaccatggtctgaaaatattaaatgggaaattctagaaataaacagtaagttttaaattgtgcaccattctgagcagcgtgatgaaaccttgcactgacctgcgccatcccacctgagttgcgaatcattccttaggccagcatagccgcagtgtagacactccccacccatctgtcatttagtagctgtctccattatcagatcaactatcagtgtcacactgcttgtgttcaagtaacccttatggcatgtaataaaagccccaaagtgcaacattaatgatgctgacatattgttataattgttctattaatattttattagttgttaatcttttactgtgcctaatttataaattaaacttcaacacaggtatgtatgtataggggaaaacgtagaatatataagggttcagtattacctgtggtttcaggcatctatgggggattttggatcatatcacctgtggataaagggggccctattataccaataaaccaacaaatgagggctgccgtgtgacagaggattagacgaaggaggtgagaacagtatcagtggacaactgcagagatcacccctctgatgtgactgtgatatgtgaaaaggttcaactattacataaagtgagatttggtatttctaaaatgtagacctggtttcattacactcaaaatgtcaccttcttagatacctacgaatggcctgcatttcctatgcaaatacaagaactgaggcagcagggcggtgaggtgtggccagtggtcactgggcagtcactgggcagtcactgagcctaagggtgtccccaagccactccggccctaccttgccaggtttgtctttgctgccgctgctggtggagctgagggatcgcatccgctgctccttctgctcctccacctcggacttcaggtgctcaatgtgcaccaggtaggcctgctcctgggcctcccgcgtgctcagcttcagctccagggccttcttctctttctccagtaggtagagctgggccttcaactcggccatctcctcctacagacaaaggagcacagagcacatgaggcatgccctatctgagagcaggcctggctgctgccaagtgggtgggtggggggtccccggctatgacccacaggcccatggtagagttctcactttgaagttggcagtaggatgagtgggaggagacgtggcacctgtcaccacacttctaaaggaatgacgtatggacaaggccatgcactttgtcagtctatggactagacctgagacagaagggtagaagttacaggcaagattgtggttcaatatagggaaaacctttctaacaaatagagcccccactcaggcacatgggccttgatggaaacccattctctggtctgcagaggctgagctgcacctgccagaggctgtaaagtcacctatccatggaaggcctcttctggccaagccccttccaattcccattttggtttccatggcaccaaccacatgtttaatcacacccacggcacctctgttgccctgtagctgggccaggcatgcggcgaatgcctgcagcagcatcaacctccagctcttgcctacttctcagggcccaaatgaaatcaatagaaacagcatccttcacaggtgactgctcatcagacaacttctaaaagtatcctaagaactcaaatgagagcgatgagtggagaatacgaagtgaatccaaaataggacagtgccatcctgggaccaggagccagtaacaatgacagccagtagcctttactgagcacgtggcactgtgctaagtgttcacatgacgtggctcatttcatcttcccaacctgggttaggtattgcaactatctccattgacagatgggaaactgaggcacacagaaggaaatccccctgcttatggctactgggtaagctgtggagccacagattgcagccaagctgtctggttcagagctatactgcctccctccctttcaaggtgagcccacgcatgactcttgtccccgcacttctgctggagagtaactccaccagcccatggccaccaggtccagccttcccagcccaccgtgagatggactcacctgaggttagttcagattctcacaacccccgaagtcacccttctgaggtaataaaccacaggcctggtgcactctcctgggtaagttggactagggggtagatgttttcactctcaaatgtggggaaatgggtagaggacacccctcgaaagggacattagtcaatatgctcagtaaactactcagaacatgccaaccttctttaccctaaatatcagacataaaagccagaatgaaaggtgtgccacgcccagagccttcggatcttttgccattggaagcaggattctgaaggttctggcaacactgcatactgagctaatgtgatggtcgcttccagaacaaacatataagtgcaggcttgaaagagggaaagagaaacctatgggtgccagaaatgaagagggaactctgccagagagaacggcaaggagggcaggtgctggccagcaaggcgtcagactgtcctcaggccctccacccgggggcttaacattacccaaggccagggccgtggcctctgaggcagagagccacagctcagacccctacgggagcaggattctcatcaggctgcccataagacactaggaaacttcctttctggagatgtgacaagtaaacttgtcatctctcaggctctgtgtgggaaaagaaagaaaaatctctttccaggaattaaacctcaagcttgtgtcatgtgtaggtgtggtacaggaatccagagccaagaacttaataacaactagtcctaaacctcagaaactgatgagtcccaacagatctaaacatagaaccactctgtagggacatctgcaacccaggatcctcagggccccacggaagacagtttccacagaggatgagctggtgcttgcattctctccccctacccccaccaccgaggaaatgagaatgaatcagcactgacgaagaatgagcggatgcaaaaagtaagagtcagcatttacaagaagcagaaataacaatgtgcaaaactagaaaataaagatttaaaacaaagtgatacaggagtcataatgaagggataagatgttcaaaaaggaagagaaggccaggcctggtgcctcacatctgtaatcccagcactttgggaggttgacctgggtggatgacttgagcccaggagtttgagactggcctgggcaacaaagtgagaccctgtttctacaaaaaaataaacttaaaaagtcagctgggtagggcagtgcattcctgtagtcccggctactcgggaggctgaggcaggaggatcacttccagcccaagggcgaggctatagtgagccatgactgtgtcactgcactccagcctgggtaacacagtgagaccctgtttcaaaacaacaaacaaacaaacaaacaacaacaaaaagaagaatggatttgaaaaggaaccaagcacatcatctagaaatgaaaaggtattacaaaaacagaaatttgaatttctcagcagttggatcctagaaactggtgaaaatccaacgtaacctgctggataatggatttggtatgggtgagcacacatccccaagcagactgggagggactcagaggaaaaggggacggctctgatatttagccttcaagaaagtcatagggaaccaagccagaatgctagcaatggctgccctggatcatgatattatggattgttctcctcccagcttttctacttttttagaaaatttctaagatcagtacacattttattttcaagtggcaaagggagtattagaacttttattccaacaaaaatgtctttcttaggtagaataccagtaaatttatcaccccacgttggccaattttaaaaaggaaatccttagtctttggccaaaagaaacacaatgtttggaacaaatgatggaagggtggcctcatagctcgtgccacaggctgcaagcatctgcaaacagggctcccagttgggggaaaagtcgctacaatgatggacccaagtctagctcataagcaatgagaggtggaatcagccaaagcagcatgaggattctctacagagaggtcaggatgggagctgcgtggcttgatgaagatgagccagtttggaaatcatgggggtgggggtgggaggtaagattcctgtatctgttaccactgcctagtgtcttcccaaacttcgcccagattctagctcaagaagctcccaaggacagggctgtgctgagtgagtcacccctgagggtgtcaggatggctgctgttgccagctcccctccactctccagagatggtgcgaccagggggttgtttttctccctgctgcggacagtactgatcctaataggagccattaactctgcactgccacgacctgctctggcttgctagactccagttcctgaccggtcctaaactcaatctctggctctcttcccctccccggaggtcaggtggctgaaagtcccaatcctccaacacacgcctggtccttctggtgaccagcccacattctgaagctgtctagggcccaccataagtcacctcatcagcatcacaaagacacccctagctcagcaagaaactccaagggtttctcaaactctgtcccaaaaccaaggacaaatatcagatatggtcttatttataccacagctgccttgtaagagcaggtaccaggtgaagggctggtgcctggcattccacaccagaaacaggcaaagtgatgtcttgttgtaggtatggcggtttaactacttcccagtaggggacaccagctttccaagaaagctcccttctgtagaaataccagcaggtaggtatctccactagcagctgaagggcccagtgtttcagatccactgaaacactgacctcaacagcactgtacaccttcactggagggcactatggtctgagcaggctcgacattgcaccaaaggtacagggtgtcaggaaactagggctctcggccaaactctacaactggcctcaccctgttctccccctgccggagttaacatcagcatcagcaacccaagacatatttccaagcattcttgagattaggggtcaatttagatggacagaggctccaccctgcagaggtctgacctggcttctcttagaggatgaagggctccaaagttgggctgggacaccctgagaaatcccttagaaattcaactcccctgtccagaaacacgcagcccaagtgacccccagacatagtgaaaccagctctgtctataaacaagggtctagctcttctctgggcaggaggggttgattcctccttatctgctggacctgctttcagaggttgtttagatttcctcctggtggcagcctagcacatgggacccacccaccacataccttcatggccatgagctcctgcataagcactgcgttttccagatccagcctctggctgtctccccgaggcttgacgtcatagctgagaggatcgatgtggatgctttccagctccagcatggtcagcttgaccgcagccctgtcattcttgagctgctggatataatccttcagcctctgctcgtcttctttagtgaactcggtgtcgcaactactggctgtggagctggttgtgctgagaaagaagaaaaacaaagacccaccaccctgtgttattccaagtcatggcaaatagatctttcctcctcactcttctccacattccctctccccagtgttatttagatggtaatccaaaaatcagttttcttcacagcataggaaaatgataccaccttttaggaaagaattaagtatgaagaataacaaatgcttacactccttgacgcaacactgtggactctagaaatgaatttctaaggaaataattccacagaagcaaaaagatacacatacaaaggaacataatctaaaatacagtttagtgatttatcacacctatcaaaaggagggaaatcatgtggacattacagtgataattgtaataagtgaaattatagtgatatcgacaatggtggtgatattttgaggacataggttaaaagatattatatatgtaataaaaaagatactcatgtggtcagaacttaaaaaaggtatatttaaggcaacaaaagttgaagcacaaaactcctatggcatgatccacagatgcgtgtcacaccctcgcacgtgtacgcaggtgtcccaggctgtggcagccgtccctgcggagcagcaccgaagggggctgttttgctgtgtttacttctgttgtttgcaacatgtaccatgaaaaacacaggggtgcacaacacagcaataaccactttgggagtagggtaccccctggccttcacaggatagtctgagtatagtgttcactatagggactcgggctggcccaagggcccttggcagcccaaggtgaatggtgaccaggcagggagcccccagctgaaccccaggcctgtggcagcccaggaaggtttctaggggaccaaaccaccatgaaagggggagcaccactggaaaacggaggccacggctttcaagtgggctctggccttttccagcagtgggcaggctgctccccgtgcctccgaataaggcccactccactcggttgaggactctgaggccagtgtgcaccgacagcagtttctctgcacttgcactgggcctccctaggggtgactcgcccctcatggaactggtctgaagatggcagaggaaaaagcagaggcctactgaccttgcatcaaaacaggccaggctgtgttgtcatgtctgttgctacagatttggaaagtgaagctcagagacatcaagtggtcagccgagtcatgcgactggaaagaggtgcaactagacttgggccgcagcctcgtcccacagccctgtccttgtccccagaatcctgtagctagaagctataccaggggccacgagtgatctccacaggccgccagatgccacaaacccaggcctgccctcctcatctcacactgcaaaagggtaagagccaggaccccaactcagtagctgtagtccccacagcctagacatgagtgagggcaggcccactcttgtacatgacacattgctacgaagacaaggcttccggggagagaaaagctgaagagagatggtggctggagctttgctgttcacaggaggaagaggctaccctagggcttggggtggtcttcaagtcagagaaccccttctagaatgggaaactcctgagcactagaaaccctttggggctgcgtctcactccctctgtaccatcaggacgggtgggaagtcccttggagataaggtaagctagatcagcctgaccattaaacaccatctcttcagaggctatgcccagtaagttcccacgtcagctgggctgggctatgtgcgcagttgcttggtcaaccaccagattaggcattgctgcgaaggtgtttgttacatgtgattaccattaaaatcaagagactacagggagactgtttccatacagtgagtgaacctcgtctaatcagagaggccttaaggggaaagacaggtcccccaaaagggaaaaaattcttcctccagacagctttcagactcaggatggcaacatcaactcttccctgggtctctagcctgacctgcagacttcagatttgccagctccattatcaaatgggccaattccttaaaataaatcactgtttgcgatttactagaatctatatcaagagatcgatcttgatctttctatctaggtatagatgtctccatatagacccacctcctattggttctgattctctgcaatgccctaagagcaaagtgctacctttacgtgtgacccaagcgtcttacatactttgaatattccctgtcttctcatctctaaaatgaaggtaatcatagtacctgcttcataaagtcagggtaaggaataaatgaggtaaaattagaagtgtttgtaatagcaaagacatggaatcaacctaaatgcccatcagtggtagactagatagagaaaatgtggcacatatataccacgaatactatgtagccataaaaaaagaatgaggtcatgtcatttgcagaaacatggatgaagcgggaggccattatccttagcaaactaatgtgggaacagaaaaccaaataccacatgttcttacttataagttggagctaaatgatgagaacacatgaacacaaagaggggaacaacaaacaatgggcctacttgagggtacagaatagcagaagggagaggatcggaaaaaatgactaatgcatacgaagcttaatacctgggtgacaaaataatttatacaacaaacctccatgacatgagtttacctatgtaacaaccgtccacatgtacccctgaacttaaaataaaagtaaaaaaaaaatagaaatgtttacaacagtgcccagcacatagtaagcactcaataaatgcagaagtcatcattcatttattcaagaaatattggagtgcctactatggggtcctggaaaaatccctgccctcagggaactcatattctaatagagtaggccaggaagtgaaatacacagtccatgagatggtgaaaaatgaagcagggaagaggcgtggggaatgcagagtgggcatgaggttattatttgtgattgagctgcagggaaggcctgtgtgatccagtgacatcagggtggacctaagggaggcgagagagggagctacgtggatgtttgcaggacacagtaaatgcaatctaggcagggagtgcggccagcagaacgagatggtgactgaagcagtcaggcaggggagagaaagaaggagaagtggtcagagagggagtgcgtgggaggggctgggtgccaggtcatgcagcattttataagggctgtgtctttttctctaggattaggatggaggccattgggggttttaacagggagggatgtggtctgctttattgttacaacaggatccatctggcctctaggatgagtagagatgcagggaggccagggcagaggcaggggtgcaccttgggagctacagcaacaattccagggagagatggtagcagcttggagcaaggtgggagcagggaaggcagggagaaagataaaaatgactactgatcatcagcattatgttttctcaagctgtattttaaaaatgagaggggagaagcagcaacatcctgcagctggaacaccacgggctattccacagtgaaatgaggcagctcaagggaactgcaaagagagcaaagcgcgcccacagcagagggcactgaggaccccggctgtgcatcagaggacgcatccaaaggaccctcagcatctcagcgaaggcctgtctgcctgcaacctgctcagcggcaggcatgcctcgtacaaaacccccaagtagagctcaggagctcaccttcacaaatcatcaacactgatgtggagggacagacatctaatgttccacaggcgaacgcgcgacaaaattagagcaaactcaagtactggcactgtttgcaaagcattctacagacagggctgagggtggagatgtgctcacagcctcgacatgtttagacagcgtggcgctggcagacagcagcacttctcttccagttacttgggaggtttcaggaatgaaatccttccttgtaaacctgggacacagggtgtggggtttacttacacctctagtctttcctttcattaaaaattattttgaaaactttcaaacctatagaaaaacaaagaataaccaacagctgtgcgtctaccacccacaagacactgaggtatattttcttcagactactttttgggaaatataaatttatacttgaaacactttttgttgactttcatttaaaataaaaatcacaaaattcaaagagtggtaaaagctagcattctctaattaccctgcaggaactgaagtgatactattttggcagattttccatttagcaggactggtccaccccagcagttttccaagaggggtcccgggctggccgcatcagcagcacctggggacttgttagaaatgcacattccggggcctgctgtcaagacctccacagtcaggaactctggaggtggagcccagcaatctgtgttttaatataccctctaggtgactctgatgcacgcttaggtgtgagaagcactggtctccccctcaggctaagtgggcatttgctcaggagcctgtgaggtgactggatgctcctaggttttctaggtagaggccacaatgctcctggctgccctggtgggtgtcagggtctacgagcaggtctctgatgtcagtcaaacctggataaatgttcctcctctgccacttccttgctttatggcccagagtaaattacccaatgtttctgggctgcaggaaataggaatactaagggttcctgcctcactaagttgtggaaaggatacggcaggccctgaagcaggcagctggtgctgccacacagcacctgtcctgtgggagtaagagagaaggtggccactttcctgatggctttgccaacagccccacaacacctaacaccagactcagagatgccctgagctattggccaccagcaggtcatccagaatccctccatcccagggagaacgaaagctgccagtggttgaatggacttgagaaatcacctagccctaacacgaacgcaggcaggcagagactgacaggcgctgccacccttagggcccggagcctcatccatggcaggcagggaaggcttttgtttcacccaccttgctatgagtatagttttcaaagaggaaggaaataaaaaaaaaaaataacaaaagatctcagtccacagatcttaccctgttggaagcacagagctttaaaatgcttttagtggagaaagtttaatttcaagataaacctcacagcccctccggcttcccttctcctgcttccaggacagcagcggggaacagatcaggcgaggttaattacaattctgctttgagctcttaacgtttcactgcggaatatgattatgacaatggtaggggaggggaagccactggccttttctctggcctcacagacaaaggcgctggcggtctcccaagggcctgctgctggctgctgggcaagggttaagtcatccattaattctcccagcttggaatgctggatgatctcagttgtcaagggggaatcaatcactttctgtggctgcattattcctcctctccagaacaggagcctgtctgtgttctctgagagcgactgtgggggaaggctaatgacaaaaaccctcgccacacatgtgtgtcttgctctggcttcttgaggagctagtctaggatgtgtgggtttctcctttccgtgatgctctgctggagctcccgtcacgctggctttcctctgcatctgttcattgccagcagctcttccagcacaaagcatacacagcaggcctgtagcctggtgggaatgcggggctggctggttcgggacggttcgggccgacccactctccacctaccctgtccactataggagaagctgttcaaaccagctatcgacgtcaaatatcctctcttctatccctctccaccatgccccacctctgtcctcaagacagtcccccagcctgctcattagaagaaaaattcatttttcatagcctcctcagcttgccttggtggaaggctagaaggacatttcatttcttttgccttgaaaatccgtgatgacattttcctgaagttttcatcaacatcttacctggccctagctgagatctcatttccatcaaggagcagctctttttgtttgtttgtttgtttgtttgtttgagacagagtctcactctgttgcccacactggagtgcaatagcatgatttggctcaccacagcctccgcctcctgggttcaagcaattctcctgcctcagcctcctgagtagctgggactacaggcatgtaccaccatgcctggctaaattttgtatttttaatagcaacaggatttcactatgttgtccagggtggtctcaaactcctgacctcatgatctgcccgcctcagcctcccaaagtgctgggattacaggtgtgagtcactgcgcccggcctagcagctcatttttagaaggaaagtgccctgggggtgggcatctgttttgctgagcatttgaaatttatctgaatgagtggggtcagtccaatgtcctttccagtgagagtcctagaatggagaactttaccatcctatgcattttgcaatgctggcattttaattgcttagttttacaacaaacatacagttcttttgaaatcaagaagttagatctcactagaaaaaaaaccataaaaagcattccatgtctataccttgttctcatagaacctaaaaggtaagtgatgaggacatttgagcaggaggactgatcataatgctgtcatgtcaaggatgtgtcggggctggtctctagagctcactaacaccagtaagcgtttgtctcaaggactttggatagactctcctgacacacagatggaaaagcacctctcctcagtaaagatgactgtttcagccagatctagtctgactctcattccctgaagcttactgatgcctgttctaactaggtggctgtttcaaaaaattcaccctttcaatggacatgatttcactctcctcaaccattttttctgccccaatgaaactttaccttaatccagactagttcaaagagtgagagctaggcatctcttgagctctgctgctgtccagtccaacttggggattacaccccagagtgagtggccacacaggcagcaccctggctacctggaggtacctagaggctcacggcaaggctgcaaccaccattctcacagctctccagggtccccacctggtgctgagacaagggactcaatttcagtctctgagagtacagacttgctgtggccgatcctgtcttggccacagttcctttgtggattgagatcgatgactacgctgcacagaaggagctgaactgtgaggcctgccacagagggtgggcttgaccaaggattcctatttccacttcctaacattttagtccttgtgcctctttgtcatgatatgttgataaagccatccaggcaatcaacctagtcactctgtccataagactattatactttctgatgaggccatggctatatttttcaaaaatgaagtggcaccgaccctgggcacctgccaacagtcaactgagggttggctatcacttttattctccttgctggttaactacccctctgctgctcctctctaaaaccattaaccctcctgtcgttaggagctgcctatgggctgccagaaatgccgctggaggcacaatactcagcgtttctttcctgaacccttgaggggcagttgatggacactctgattagacctcttgaagctgggtggttacagcggggggaaaggagatttgctgggccacataaagctccaactcagaaagatccttttctttattttcataaacttgacaagggggaatgtctgagccagaatggcaagatttacaaacaaaattactataattatcataattatgaaaggggtctggtgctttgggactttattctaaacccacgtttaacataaagcagtctaattgcatcaggttctaagaatgtggagtgacaaatgaatgcctcgtgtgtggttcttccatcctcggagctgctctgatttgggcgggagggtaaaagtgattttttaaggagaattgggtgacattggagctaaagacctctgtactttgatgggaagatccatttgagactgaaattaatttaagaaccattctttggtgaggttatccttggaaacaatgactctgtgttttgaatttatctcaatctgcagaaaaacaggatcccaaattaaatttctctaagaaaacagtctcaaaatcaaggctaacctgtaagttcaagtacttctaacaaatattcaaaagctaaatagatggtgataaaattgttctccctcctgactggttctaaatttgtctctgattcagaataaaaccacaacattctttttgggggtagggaggtttgagcaaatgatccgtagcacaaacctcataagctactgaaacagcacacatttcctgtcaagcaaactcttatgttcactaataaaacaacacagcatcactgacaacatgagaactacatttctatactaaataaacacacaaattatagattatacacatctggaagagtcattaagaagagcatctgctttctgtgtttacacagtagaatatggttttatgaaaaaaattataatctgtgcttcactgaatgagacaattgttgctgaagtaaagaagaatcaagtcccttttgtttgtgggcacctggctgagtgcattactgggcatgttccctctcctgggacacctgggccagtagaggtaaatggaagcgctaaggtagatggcgggtcccaccaggggagaaagagagaggggaacattaagttgctttccagcaccaagaaagcatcagtatttctcctctggctctcaacagtcaatctatctttatgcagttctggtcacttagtctgcaagtagacactgttttgttatgtcatgagatccaatgtgggaagaacaatatgctcgatgctaagatcccgggttcccatccaggtttccctcttatcaccaggcaggtcactgacattatctctgagccaaggtttcctaacctgtgaaaatggagtaagttacccttccaagtctttcacgatttggcaattaagtaagaatctctaacaaagtgtcttctaaactgaggactggtaaataaagggaaggcattcgtgtttttagggctttggtggcaagaaatgagaaggtaagtagaaagggttttgttctgactctccactcccatccaaagaatgaaatgacttcagcaaattatgctctgcaaggtcttcgccgctctcttcctagcttcctttttcaagcacccactttaatttcctagattcacagacagtgaacttgacctcaggttcatgactgagtgcctgtaagcatgtgctgtgaatgtggcatcattccatgaggcaaaagagatgagaggagaggctcttgcctgagaagagcttatagacgatggaggcacaagaagacaggagagtgatgtctggaactaggatgagctgggctgggccttgggaccagagggaccatttggagcaaacggctcttggctaccctaagtgcttcctggaaatgaagacttataaagaaatggagaacagaacaatgcagagaaaatggatctgacagaaaggtaggtttgcattccatctctaccactttccacagcaaatctctccaatctcgactgcagtttccacattggcaaagtgagagggccactttctagctcttctgttctgatcttctgactcctttttggatggagcaggctgcatgccagaagccatgtctgccttttcccaagccacacagtccccaagagctgggtcactgcacaccaagtccagtgaacagatgccatgtggacacacgcccaccccagagcagaaggctgagcattacctggtgtggctgttggaggaaaggctctcccagggctgcacgctgcagccggccacggcaaaggctcccccacagctgccgtccagcttcatgagcagggccttggcagcgttctcagctgtcttccggcagtcatgagctcgcttgagcatctgagtgatgttttcatcccccgactggtctcctatgtggcagagaagccaacggattaatcaacataggcctggacaaggcacgcctgggagggactatgcataattaactctgttacttagggcagaggtggcactgtggaagggaattggcagtgcccagccgaagagaagatctgtgttctgggcctggcactatcacttagacgctacatgtgggaaggtatttctctgctctttctctgggctccactggcctcagggacaagtgtaggagttaaccaatgggatcaccacatttctgtttccagctctaacacgctctgatttttctaatgatccaggctcctggcttctcctcccattcagccacaagtctaccatttggccattcctctgtgcattggcacttccctgtgaatgagggagggagaaactagggcaaaactgtgccatctttccacatgtctacagctttggttagagccctgtgtgggggcaagagagacaaaactaatggttcagacgagagctttagattggctctgtattataggtaccgatgccacccctgacccttctcttggcttggtaatcggcgtgaactcaaatgcctccaggagccaggtaagtgggctagtgcagaacatcagggtgtggtgggcactcgcacagaccaggcagtgaagtccctgcccaaaatgttcacattcctattgtgatttaagactgtgctggaaaagacagaactatagagatattgaaaagatcatgggtggctgagctgaggtgggaggactgcttgaacttaggagttcaaatacagcctgggtaacagagcaagaccctgtctccaaaacaacaacaagaacaacagcaacagcaatggttgccaggggatggggttgggggaggaatgaataggtggagccagagaacttttggggcagtgaagctactctgtatgatactgtaaccgtggactcaagttgttatacattggcccaaacccatagaatgtacagcaccaagaatgaactctgatgtaaactatgggctctgggtgatgatgtgtcactgtaggttcatcacttgtaactaatatactaccctggtgggggacgctgaaaacgggggaggccgtgcatgttgagggttggaggcatatgggaaatctctgtgccttcctctcagttttgctgtgaacctaaaactgctctaaaaaaacaaagccttaaaaaaataaaacaaaacaaaacagaaactgtgctggctgaacaaatcactggtttgctacctgtacagcacagatccatgcttttccaaatatttttaaatgaaatcttacaccaaatcatagaaaatgctatcctaacatacaaaaaaggtaaatgcggaattggatgaagtgggcagaagtgggagacacactcagagtcccaccctccaaccccactgccgaggcccagagaaactcctccagcttcccagaccagtttgaaaaccactagcctaaagcacctgtgaatgaaagaatgaacagaatgaatgcctgtgacatcaacaagaaacaaagaaaagacccacaatcatagatactgtgggtgcatgtcacaaatgagttcctgctttgctgtgcaacagctctatggcatgatgggtggcatgatggcacagtatgatgggccagccactcctgtcagcggaatgcaagggcgaggcttaatggggaactgctaaaaatcaagcctgccctcagtactatggagagtgggcaggaaatggggtggacccattctgcaggccaaaaatccctggaactccctcctgtcatttctctgacaaacttcatgcctctcttctctccacaaataagacattttacatacatctcaccactgactgctatttggaattaggcatgacattacttactggctcatattataaatgtatacatgaacttcccagtattaggtaaatacaaagcatttcattattgattttgaatatttaaaaggcagatttatttaagctctttcagctcctacaccaaataactgcactgagtaggtacatgcctaatgaaaggtaccttgtgaggcctgaacaggttaagacactccgctgataaccaactggaaatacgattgactttttcctttaatttatcatttttcttaatacgtatattaatttaaaaaaatcctgacagcaggccaagatcattttaggatctgtttcatatgagaaataaagttttatggttcagttaaaagaccctgaaaaatgaggtttctaatggaaatgctggcagagtttctacttctgggctgggctggtaatactatttaaaaaaaaccagagggaggatcagagcatcactctccatacaaatgaaggtgtgctcctttgttggattacttggatatgaagcaggaaattaacacccaggataccttccttccttcacttttgcttcagattcctgtgcaagtcgaaactgaaggaggaaacacatgtgagtgttcagtgcaaaagtgagcccccagacaaagggggaggagcggggaagaaggacaggaaggtgcattcagaaggtgcctggatggtgactttctttgaagggtgtgtcctggatggacaagtcctaatggaagctcacagcagaaatccagtccatgacagaggcctggctaccacacatgggaatgcctggcctgcccacaccatccatctttggctctggagagacctggtcaccttggctttctgtttacttgctattgcctctccgaaggctaagggggtgtccggggcttagttctgcatggagagacggccacctttctccttgggtctctctttcctcttagcactgtttctactgcagtcctccccacatcactgcaggctcggagccacaatcactggccacgttttagcaaatgctgccgcttcctagaatgacatgcttgtgtccaattagatactccttccaccttactcaaaattgagggacagaagtgagcaggcagtgcagatctcgaggtacaggtcaggccaacagggcacaggatccccgggctgggggaaggacaggcacaggaaagcgaggtgggcgagcattctgtgatgctgacaagagcagggggtgaaactacttcttctttgttcgtaagacacctggagacctggcaggggaaacccatgtttcaaaactactcaaaagccgggcgcagtggctcacgcatgtaatcccagcactttgaggcaggtggatcacctgaggtcaggagttcaagaccaggctgaccaacatggtgaaactgtctccactaaaaatacaaaattagccaggcgtggtggcatgtgcctgtaatcccagctacttgggaggctgaggcaggaggatgcttgaacctaggaggtggaggttgcagtgagccaagattgcaccattgcactccagcctgggcaacaagagcaaaactccatctcaaaacaaacaaacaaaaaaaacaactactactcaaagaggtaaacttggagaagctcagccaatggaacgagatgaagtgaaggccatgtggcggcagcatgtgccttgacaacaggcatcagagagacagctgcagaaacgctggcccctttcatcgctgatgcggcctcagctccatctggccccactgtcagcccaggagaatgcagctcctaagaagtcttgtttgttttaacttgtctgttattctgtttccactccagttcttgctgcattcaacataaacaatttacccattcagtcatgaggaaaaacgaaaaacacacttgacaaccaaattttgtgttgtcgggagatgattcaatgccagttgctgagacaggggcagaagcaaaggaggcagggagacaagaggaggaagagggactctggagacacttaccaggggaggaccccacgcccgccgctcggaactgccccaggatgaggctctgctcactctctgccagcgccaggaggagttcgtaggcttcgatgcactgctcgctgaaacaaagcacatggggcctcagcccttgcagagaacagcggacaccttcaatgtggcgccggtttctgtgcaggaggcagctcaggtgctgtctcggcctcactctccacacaggcaaggaaaccacccatgaatattcccagggcagggccagtggcttgctctttcatttggcctttttatttttaaacctttaacttggttctggaaaaatacaagagaaacaataaaggtgggagaggcaaatgtgtcgtcccttcagtgaccacctgaaaggaccatgtgattcccttgtggtaggccactccaggtagtcccgctgagccggcaccctggtgtccacacccttgtgctgtcccccatctgcactgtaccagggttggtctgtgtgacagaagtgacagtaggtcatttccaaaattagcttactaaaaaaccctgacttccatcttggtcactctctctcacttcactatcttggaccatcctccccggagcaggccagctgtcgtgtcttcaagattctcaggcagccctatggagaggtccacatggtgagtaatgactaaggcctccagccaacagccaggtgagtgagccttcttagagcagatcctccaatcccccactgaggtctcagatgatacagccctggctgacagcttgaccagaatctcacaagagaccctgaaccagaaccacctactaagccacccccaggttcctgatccttgaaactgtgatgcagtaagtgattagtcatacaacaataggtagctgatataacatcccacaaggagatgattttgacctagacctgcactattcaatatagtatctactagccacaaatagctacttaaattgaaaatattctgagttaaataaaatgaaaaagtccattcctccattgcagtagccatacttcatatgttcaatagccatacatggccagtggttaccatattgggcagtgcatgtagagaacagttccaccatcacagaaaagttctattagattctcataaaactaagtgcttaaaatgtctcatgaaacattcttaggccttcacaaaagctctgacaagagtttgagtttggatttctaggaggaggaaacatagtcactcttctttgtgcccaacattcattgggcaaacaaggtaaaatatcaaacaacagtccctttcctgtagcgtgagacccacgtggcccacgtccacacaagaggaggtggaacatgtgtacagcatcctcagggtcccagataatatgcctgcagtaggaacatttcctctttaagaaagtaactgtctagcttcttcaagctgaacaggggatatgttgcttcatttagtcaacagacaatttcctttgattgcctttcttttttttctttgagacggagtctcgctctgtcgcccaggctggagtgcagtggcacgatctcagctcactgcaagctccgcctcccaggttcacgccattatcctgcctcagcctcccgcctcagcctcctgagtagctgggactacaggcgtccaccaccatgcctggctaacttttttttttgtatttttagtagcgacggggtttcactgtgttagccaggatgatcttgatctcctgacctcgtgatccgcccgcctcggcctcctaaaatgctgggattccaggcgtgagccaccgcgcccagcgtcaattgactttattttcattgtcctttactaagagttaagacaaagggctgaaatgctagccctaggtgataccagctcctcgtttcaaaggcagttcatattccagagatgtgaggacatttccttatccatgaggttgtactaatgtggagaaagacctttctgctcaaaggcagattgtgggtggacagcaaccagcttcaacggttatcacagatggattatctgcttgctttgctgtctgtaaaccagaatgattgctctctagctttggtctcattcattttgctttgataatttcctgaataaacaagaatgtttcttaaacaataccgaactttttagaggatgctaagtgtacgatacagtcaactactctgaggccttggcaaatacacttaagtggtaacactaataaaagaaacctatgatgataataataaggcatagttttgcagctttaaacaagcagtaatttaaaaacagataaatttcaaagtgatgaggcagaaaaaaaaaagtggcccattcaaattaccacttgctcaccaatgagtgaactgtagttatttaaattgacttgttttcatgacaaaaaatcagcagcatgcctgaagaccaggaaaatattcatatcctttgacctacaattcctgctttgggattttatccagaggaaaatattcaaaagaatgaagatcttatctgcattaaattattcatcatagaattatttttaatatcaaaagtctaaatgtcttttagaaaagtgaataaattaacaatataaaaacttgttggaggggttacagccattcagaatagagactattaaaagcaacattttaagactacaacaaaatgaagaactagaatgcactagatttataacaatgtaaattacatatgaacatgaataaagatctgcaagaagaaatgaacatgtaacatgccaaaaaaatcgatattttgagtgatagtacctaaatgaaatgatatttaagatgaatatgctaggagaaatatacctgtttactaacatcatattcattactcttagctatttgctgtccaaaccgccagatatgccttggtccaaactgccagatatgccttctaaaagcctatttcctacttttattctgaaggttactctggatgcacttctaccctgaagtagctccaaacatcccagtgtgtgcctacctgtactgcaaggccagcctcagcgctgtggcattggattcgtattttcccaccagcatgctcatcctctcggcattgcttttacattcctccaaggttatggtcaggaggtcattttgggatttgaggtgctcaatccggctacaaaggaacaaaaatcagattcacactagggttacagttaatttgccaatatttcagttgtctcatttatattcagggcagaaaagcatgtgaggatgtgggcctgtcagattagtagctgacacagtattttgtcaaagaagcaactctacataaaagtatcaccaaactctgtgtgaattacaaataaaaaataagccccctggttaaaaataagccccccagccattgccacactcactccatgtctatcatgagcagggcacagtgctaggctctggagatattccaaggaaaggagacagttgtgcaacctccaggccgccatcatgtggaacgtctggtgggcttagataagtcaccctccacatgcaaggatgaaaagcagcaagacagcagtcatggctatttgttaagcctttgctttagtgattctcctagcagccttttgaattaagtgttgttactcccatttcagatgaggaaatggaggtccagaaacattaagtatcttgccctgggatttgaaccgggaagtgtgaccccaaatcccatcctcataatcacaaactacagagagaaccaaaggaagaatcagtgagtgaacaggaaacttcccctggtggcctttaagtgggaaatggacgaggagctatggattgtacccaaagctgcttttgggttacacagtctagcagctctaactagtggtaggataagcattgggaacttgaagttttacaagattcagaactgtagattcagggcaaatgagtctgtggcaaagttagcaaacaaatgaataatatgatccttcagcttctccgttttccatctcagggtacagatgctcttgatgccacaagtcattttccatggacacatctatttgtagtactctgaccactaactcttaaagagaaagcttcacacaaacaaactgcaagtgacttgaaatgttaaggggtttggaagccattagcttcaaggaaaaatcttagactcaagccttagagcagaatatggagacacttgccaacatgggagacatctggtgagtgtagaagaactaagatcactgccaggctctggccattccaaggtcacttcaaggtaaggtgccacaagaatgcttttctgcccctgttcacattaagacttcttgaaaagagtcaccattctctcacttttcaacttgctccagtctacagtctgtcccggctaattagataaagcctttacccaactcatagacctccatgtagccaagcccatctcagggcccttctcagacaacaccccactgatctgttactctttccttcttaaagagctcccctcacttaagccatggtgggtctctgctggttttcttcctgccctagcggctatttcctctcagtctcctttgctagatgctcattctctataaaattagtaaggcttgccattctcttggggctgtcccggggtcccctctgctatcaacactcccaccctaggggtgatttctatccagtcccatgatgttattaggcaggtatgctccgctggctcacaactttctctagcccagcgctttcttctgagggccaggctcacatatccagctgccttcctgacatttccttttgctgtcacattgccacctctagtttaacattccaaagtgggattcttgatttcccctgaacctcatcctcccttatcttctccatctcagtaaatgccaccaccgtctacccaacactacatgctagaccaagcttgtccaacctgtgggctgcatggggcccaacacaaatttgtaaactttcttgaaacattacgagatatttttgcaatttttttttttttcagttcatcagctgtcatttgtgttagtgtattttatgtttggcccgagacattgctcttcttccagtgtggcccaggaagccaaaagattggacacccctgcactagacccctgaggatcttttttgagaccattcctttctcttattcaagtgcaacccagctgcagtttccactgctttcagcaccacacatggcgtgcgtgaggcccctggccccatcctgccagagctgccctggcataccacaaagattgtgctgcttccactcttatcccatccttcccattctccacacccaggtaagcttccataatgtcaatcagatcttgtttttccacattcgaaaaccctttaatgacttctaattacacttcgaataaagagtaaaatttgtccgtggcatcaaaatccacagctgagccagcccctgctctgccacctcgtctcatgtagcttcttccccttactccatttcagttccgctggcctttggacaattcctctttcaggcctcatggttgttaagtggccataagaatatcagttcgccatatggctgcttttttttttttttcttttaaatccatctcaatgtaagcctcccatcttcagatgcctgccctgactacccaccgaaaaattaaccttctctggggtcccacgcccacggagcttcgctcactgctagcacagcagtctgagatcaaactgcaaggccacagcgaggttgggggacgggcgtccgccactgctgagggttgagtaggtaaacaaagtggctgggaagctcaaactgggtggagcccaccgcagttcaaggagacctgcctgcctctgtagactccaccgctgggggcagggcatagctgaacaaaaggcagcagacaacttctgcagacttaaaagtccctgtctgacagctatgaagagagcagtggttctcccaccatgcagtttgagctctgagaatggatagactgcctcctcaagtgggtccctgacccctgagtagcctaactgggagacacctcccagtaggggccgactgacacctcatacagctgggtgcccctttgatacgaagcttccagaggaaggatcaggcagcaacatctgccgttctgcagtatttgctgttctgcagcctccgctggtgatacccacacaaacagggtctggagtggacctccagcaaactccaacagacctgcagctgagggtcctgactattagaaggaaaactaacaaacagaaaggacatccacaccaaaaccccatctgtacatcaccatcatcaatgaccaaaggtagataaaaccacaaagatggggagaaaccagagcagaaaagctgaaaattctaaaaatcagagtgcctcttctcctccaaaggaagacagctcctcgccagcaatggaacaaagctggacagagaatgactttgatgagttgatagaagaaggcttcagacgatagataataacaaacttctccaagctaaaggaggatgttcgagcccattgcaaagaagctaaaaaccttgaaaaaagattagacaaatggctaactagaataaacagtgtagacaagtccttaaatgacctgaaggagctgaaaaccacggcacaagaactacatgatgcatgcaaaagcttcagtagctgatttgatcaagtggaagaaagcgtatcagggattgaagatcatatgaatgaaatgaagtgagaagagaagtttagagaaaaatgagtaaaaagaaatgaacaaagcctccaagaaataagggactgagaggtgacaaagtgctagcagcccttgcttgctcttggcacctcgtcggcctcggtgtctgctctggccatgctcaaggagcgcttcagcccaccactgcactgtgggggcccctctctggggtggctgaggccagagccagctccctctgcttgatgggaagtgtggagggagaggtgcgtggcactcgtgggccagcacgagttccagctcagcatgggctcaccaggccccgcacttggagcagccggctggtgccactggccctgggcagtgaggggcttagcacccgggccagcagctgtggagggtgcaccgggtaccacagcacttccggcccgctcgcgccacgctcgaattctcactgggcctcagctgcctccccgcggagcagggcttgggacctgcagcctaccatgcccgagcccccctcaccccctgtgggttcccgtgcatcccaagcctccccgatgggtgccgccccctgctctgaggtgcccagtcccatcgaccgcccaagggctgaggagtgtgggtgcatggcacgggactggcgggcagctccgccagcggtcccagcgcaggatccactaggtgaagccagctgggctcttgagtcgggtggggtcttggagaacttttaagtctagctggaggattgtaattgcaccaatcagcactctgtgtctagctcaaggtttgtaaatgcaccagtcagcaccctgtcaaaacagaccaatcacctctctgtaaaacagaccaatcagctctctgtaaaatggaccaatcagcaggatgtgggtgggacgagataagggaataaaagcaggctgcccgagccagcagcagcaacccgctcgggtgcccttccatgctgtggaagctttgttctcttgctcttcacaataaatcttgctgctgctcactctttgggtccgcgccacctttaagagctgtaacactcaacgtgaaggtctgcagcttcactcctgaagccagtgagtccacgataccaccagaaggaaccaacaactccagatgcgccccctttaagagctgtaactcactgtgaaggtctgcagcttcagtcttgaagccagcgagaccacaaacccaccagaaggaagaaactccggacacgtctgaacatcagaaggaacaaactccagacacaccatctttaagaactgtaacactcactgcgagggtccacggcttcattcttgaagtcagcaagaccaagaacccaccaatactggacacaggactatgtgaaaagaccaaatctacatctgattggtggacctgaaagtgatggggagaatggaaccaagctggaaagcactctgcaggatattatccaggagaacgtccccaacctagcaaggcagaccaacattcacattcaggaaatacagagaacaccacaaagatactccttgagaagagcatctccaagacacataattgtcagattcaccaaagttgaaatgaaggaaaaaaatgttaagggcagccacagagaaaggtcgggttacccacaaagggaagcccatcagagtagtagctgatttcttgggagaaactctaaaagccagaagagagtgggggccaatattaaatactcttaaagaaaagcattttcaacccagaatttcatatgcagccaaactaagcttcataagtgaagaataaataaaatcctttacagacgaacaaatgctgagagattttgtcaccaccaggcctgccttacaagagctcctaaaggaagcataaacatggaaaggaacaaccggtaccagccactacaaaaacatgccaaattgtaaagaccatcaaggctaggaagaaactgcatcaactaacaagcaaaataaccagctaacatcataatgacaggatcaaattcacacataatattaaccttaaatgtaaatgggctaaatgtttcaattaaaagacacagactggcaaattggataaagagtcaagacccatgagtgtgctgtattcaagaaacccatctcacgagcagagacacacatgggctcaaaatgaaggcatggaggaagatctaccaagcaaatggaaaacaaaaagaagcaggggttgcaatcctagtctctgataaaacagactttaaaccaacaaagatcaaaagagacaaagaaggccattacataatggtaaagggatcaattcaacaagaagagctaactatcctaaatatatatgcacccaatacaggagcacccagattcataaagcaagtccttagagacctacaaagagacttagactcccacacaataataatggagactttaacaccctactgtcaacattagacagatcaatgagacagaaagttaacaaggatatccaggaattgaactcagctgtccaccaagcagaccaaacaggcatctacagaactctccaccccaaatcaacagaatatacattcttctcagcaccacatcacacttattccaaaattgaccgtgtagttagaaggaaagcactcctcagcaaatggaaaagaatagaaattataacaaactgtctctcagaacacagtgcaatcaaactagaactcaggattaagaaactcactcaaaactgcataactacatggaaactgaacaacctgctcctgaatgactactgggtacataatgaaatgaaggcagaaataaagatgttctttgaaaccaatgagaacaaagacaaaacatacaagaatctctgggacacatttaaagcagtgtgtagagggaaacttatagcactaaatgcctacaagagaaagcaggaaagatctaaaatcgacaccctaacatcacaattaaaagaattagaaaatcaagagccaacacattcaaaagctagcagaaggcaagaaaaaactaagatcagagcagaactgaaggaaagagagacacaaaaaacccttcaaaaaatcaatgaatccaggagctggttttttgaaaggatcaacaaaattgatagaccgctagcaagactaataaagaagaaaagagatgaatcaaatagacgcaataaaaaataataaaggggatatcaccactgatcccacaaaaatacaaactaccatcagagaataccataaacacctctacacaaataaactagaaaatctagaagaaacagataaattcctggacacatacaccttcccaacactaaaccgggaaggagttgaatccctgaataggccaataacaggttctgaaattgaggcaataattaatagcctatcaaccaaaagaagtccaggaccagacagattcacagccgaattctaccagaggtacaaggagaagctggtatcattccttctgaaactgttccaatcaatagaaaaagagggaatcctccctcattcattttatgaggccagcatcatcctgataccaaaaactggcagagacacaacaacaaaaaaagagaattccagaccaatatccctgatgaacattgatgcaaagacctcaataaaatactggcaaaccaaatccagcagcacatcaaaaagcttatccaccatgatcaagtgggcttcatccctgggatgcaaggctggttcaacatatgcaaatcaataaacgttaatccatcatataaatagaaccaaagacaaaaaccacacgattatctcaatagatgcagaaaaggcctttgacaacattcaacagctcttcatgctaaaaactctcaataatctaggtattgatgggacgtatctcaaaataataagagctatctatgacaaacccacagccaatatcatactgaatgggcacaaactggaagcattccctttgaaaactggcacaagacagggatgccctctctcaccactcctattcaacacagtgttggaagttctggccagggcaatgaggcaggagaaagaaataaagggtattcaattaggaaaagaggaagtcaaactgtccctgtttgcagatgacatgattgtatatttagaaatccccatcacctcagcccaaaatctccttaagctgataagcaacttcagaaaagtctcaggatacaaaatcaacctgcaaaaatcacaagcattcctgtacaccaataacagacaaacagagagccaaatcatgagtggactcccattcacaactgattcaaagagaataaaatacctaggaatccaacttacaagggatgtgaaggacctcttcaaggagaactacaaaccactgctcaacgaaatagaagaaacaaacaaatggaagaacattccatgctcatggataggaagaatcaatattgtgaaaatggccatactgcccaaggcaatttatagattcaatgccatccccatcaagctatcaatgacattcttcacagaattggaaaaaaactactttaaagttcatatggaaccaaaaaagagcccacattgctaagacaatcctaagccaaaagaacaaagctggaggcatcatgctacctgacttcaaactatactacaaggccacagtaaccaaaacagcatggtactggtaccagaacagagatatagaccaatggaacagaatagagccctcagaaataataccgcacatctacaaccatctgatctttgacaaacctgccaaaaacaagaaatggggaaaggattccctagttaataaatggtgctgggaaaactggctagccatatgtagaaagctgaaactggatcccttccttacaccttaaacaaaaattaattcaagatggattaaagatttaaatgttagacctaaaaccgtaaaacctctagaagaaaacctaggcaataccattcaggacataggcatgggcaaggacttcatgactaaaacaccaaaagcaatggcaccaaaggcaaaatagacaaatgggatctaattaaactaaagagcttctgcacagcaaaagaaactgccatcagagtgaacaggcaacctacagaatgggagaacatttttacaatctacccatctgacaaagggctaatatccagaatctataaacaaacaaatttacaagacaaaatcaaacaaccccatcaaaaagtgggtgaaggatatgaacagacacttctcaaaagaagacatttatgcagccaacagacacatgaaaaaatgctcagcatcactggccatcagagaaatgcaaatcaaaaccacaatgagataccatctcacaccagttagaatggcaatcattaaaaagtcaggaaacaacaggtgctggaaaggatgtggagaaacaggaacacttttacactgttggtgggactgtaaactagttcaaccattgtggaagacagtgtggtgattcctcaaggatctagaactagaaataccatttgacccagccatcccattactgagcatatgcctaaaggattataaattatgctgctataaagacacatgcacatgtatgtttattatggcactattcacaatagcaaagacttggaaccaacccaaatgtccatcaatgatagactgcattaagaaaatgtggcacacatacaccatggaatactactcagccataaaaaaggatgagttcatgtcctctgtagggacatggatgaagctggaaaccatcattctcagcaaactatcacaaggacagaaaaccaaacaccacatgttctcactcataggtgggaattgaacaatgagaacacctggacacacggtgtggaacatcacacaccggggcctgtcgtggggtggagggagcggggagggatagcattaggagatatacctaatgtaaatgatgagttgatgggtgcagcacaccaacatggcacatgtatacctatgtaaaaaacctgcacgttgtgcacatataccctagaacttaaagtataattaacaacaacaacaaaaaaaaaaaagaaaagaaaaaagaaaaatcacccctcccagagcttctgttggtgtcctatttatttccttcttggatctttcttatcatcttatttgttttctctttggtctattttccctaacagaatataagctccatgagagcagggaccctttctgttttactttgctttgcatgccacatagcctagcatatagcagatgcttaacacagatttgctaaagaaggaaaacattttggtgggtagggatgaccccccctcccctgccaatcatgaagttaaaggctaacatactttgagagtaataggcctccaactttgaggtagttagaatagcagacatcaggatatactggtagcttatttctaagaacccccaggttcccgcagcagctaggatcacagagatgacaatggaggtgaggtcaaagggtaagggttggaattctgtctcagctacttaatagctctggatttaaggcaagtcactcaacttgggacttcaaagcctttgttttctcatttgcaaaacaggactactctaccctcacaagctgaggattaagtggctgtctgcgagagccctttgtaagctgttaaacaccataataacatcagctaccagcaaaatatttcccccttctttggtctctcctgggtgtatataacggagtagaaagcaactgccctattcaaggtcagccacagatccaacttgttaaagcccagaatctgtagagaggagatcctcactaaatcgaggtccccctgaaggcatctgacttcattaaattgcaaagggcatatctgattcaatttttaagcactcccagggcagtgatactgaaaagactgcttctttactgccactaagtaatcaccaggattatcactcttaagtattctggatttaataaggaaaccatttaatttcaagatttaaaatgacctagattgccaatttaccttagttctcaagaactgtattaaacagcttcaatcaggcaggactaacatgataattcaatttattctggtttgccatacacaagaggaatggaattaagcaacagcggatggggaacggtatccctatttcttcctggttagctcataagtctttcaaattcttacaatgctctcccactaaagattggtaggtcaaggcagccacaccacactcggatgtgactcaacagtccattctgccactgcagaaccaattctgaggccaagtggtttccatggttttgccctggtcattctcctttgctttgttagcaactccctcatcactggcatgacacataagagagtctttgccaacaggcaaaagggcaaactgaaactacctcttttgtaagacttgaaaagaatccataaaatggggtatatggtaaaattactctaggtaggacagttaggataggatgtagggatccaagactgagcacatttgcgaagaacataaataaaactaggcaaccatcaggaagatgatctaaatcagcatgcctggtcgatgccaggaatggctctaccagattgcctgtgctgtttccagtagctccaagtgcctctaggatgctgactcaacattccagaactcccttctgtggttctctgcagcacaggcctgcatgcttggcagccacctgtgacctacttgccattctgtagggactgctcccaggactcactatgtaatttgcaaggtccagtgtgaaacgaaaaagtggggtccgttgtttaacaatattaagaatttaaaacgttgacagcagagcagtgaagcaagtatggcacctttctaagcataaggcccatgtgaatgccaggtcacagccatgatggcagctcagactgctgtgagcactcctctgatgaccaaggtggtaggaacttccatccccaccagcctgacggtactgctctatgtcacaatacataagccaccttgaacagatctttggaaagagaagtgaggagtagcacctcctccctgccccacaatcaaatcgatacgatctctcctcacctattcagccgttctgtttccacctcaaactctctaatcttgctttctgagatggcagatccgtgtgagtagagtgtttggaaaatctcttggatattggagcagtcctgaagtgagtgggccaggtgttcagccacactgctggatacctgcaaaaagaagcattaattcccctttggaacatatcatttcagagatgcatgttttgcatgcaaaagaatttaaagctgatattccgtgagaatcggggactgggaggatggttaccctgaaggttctcagtttgtaggatagaatcctagtatgaaaagctaactattaaatactataaaagcagtagaaaaaaaaaaccaggatcaaaatatggctccttccccaagcacgtggtgctgggcagccaggatggggagatcatgccttcttggagttccttaaattctgaatgtggaacagagtcaggatttctttcccctatcctgaattccctgccactccaggccactgtttttggtttctgtagcccaggagaggggctgactccttcattttcacaatttggctttggcacagaatctgaatgcatgcatttttgctcagtgtaaaattctaaattagggccttaaaatgctattcaggctctctctgcctctgaggatcaaatagctggctctctaagcctcatccccaatcctaaaagatcccttaaagaaatgaaactactccttttcaccatccatcagctcttacagtcccagggggtttccagactccacaaatgaaaactctggaactaaagtgaaggttctggtctttcccaccactgggctaggcttcaaagacaacattcctcctcagtggaaagcacatcccctttcaagatggatgtgcaaaagacaaagttattttagagctcttggtctctggggtagcagggtgatataagacagatacttcaagactttcatctatatcaccaagaactggacctaaatcatttgtttctgaatggtttcaaggaaaggaaaaaaaatctcccttaaagctgaagaagtaattcaccatatggatggaaatcatcatacattttaatttaatcctttggaaggaaatcaggtatgatttactattataactaactggtttattggagatagactttggaagttcttctgtcatctataatccattgtctgtgtagctctgccgggtactttcttgccttgcttctcatgaacactcacccctatgctactgatttctgagcccaggactggccgatcagatgatgacgattcggaccttgtctttgatagcttcaccctctcagcaatcttaaaaaagaaaacaaaacattatagaaaactacacaccactcctcagataaactgttgggactacgcttatacagggctactttttagccatgtcaactaaatgattaaagaacttaagaacagctcacgtccaatttttctaccaccagcttaagccagggcctttcaacttcagcactgctgatattttggcttggataattctttttatgggggtctgtcctgtgcattgtaggacatttgtcagcatctctggcctctagccacaagatgccagtagcactccaattgtgaccatcaaaaatgtctctagacattgccaaatgtcccctggaggatgaaatcacttctggttagaaaacactggtttaacctaacttattaaacttgatagttaagaatcaaccttattgtggtggctagcagagctaccaggcaagccaacaggcataattttaatcatctgagacagactcaacataggtactggggggctgtggcagtgagtcagtggggctacttctcacagctgccacagcctgtccatcataatctatttttctttttttgtggcagagctgtcagtcttgtgagtggggagatcattggttcattactcaaggtccctgactgggctgaaccttagtctttgagagcaactctgtccactgtgaagtactggagcacttgacaaaacgtctcactctccataatgacttgtcagctgtgacattctccagctggctgattaatgagagctggcgtccaggttgcagctgagagagacttaaaactattagtgggttatctctccttgcagctcctgcatagaaggcctgcgtaaggtcccaggggaagccccttgtgctgtctcagctaagggcatgcctgtacagtggctaggatgagcctggtgcttccagataacaggaggtgttcccgctcatcgggtccatccccaggaactcaccttggcgatgggaatgtcattgctgctgctgcttgtgctcagctccccagtgctggggttaatcgggcggttggtggaagtgaggcggccagggctggagggacctgtggcctgcacgctctgtagtcgagtttgaagctctctgacctgaaatcataatgcttttagacatagttggtggtttccctggctaaagagcaaaacagccagatgggtaggtggtggggctttcatttacattgagggatcagcccactgaaaagctaggttggttgagtccacataaaagtcattatattccttttttcggactaataatttttttttaatgaatcggtttcttaaatcacatgtaatacaaaaagtagagttataaaccaaagtgatgatattactagtttttatatttgcctaagagtcaccatattcttaacggaatctgccacagaccatcacctattcttcacaagcatgaggtgaacatattatgtaaggccctggaagcttccaggatggatgaccatctttttttatttttatttttttgagacagggtcttgctctgctgcccaggctggaatgcagtggtgcaaccatggctcactgcagccttaatctcctgggctcaagggatcctcctgcctcagcctcctgagcagctgggactaggtgcacacaccacacctggctaatttttaaattcctttgtaaagatagagtctcgctatgttgccagggctcgtcttgaactcctgcactcaagcgattctcccacctcagcctcccaaagtgctgggattaccggcatgagccactgtgccaagccactggataactacctttaaggaatgtttattctttcagccccacttgcctgactgtgctggggactgcggacgaggacccaggatgatatcacctctcatggaatcatcatttcagagcccagaggagacaggaatgatttcaagacaagtgcacttgagtgttataaatttctatgtcaagtgttacgggaagcagaaaaagggaagaatataactccagctgaagtcatccagagaaagctgaatgaagacagtggtacttgagcaatcttaaaggagaacaagtgaggagatggctttagtggtgatatgcctggggggttgaacaggtgctaggatgatatgctatgtttgaagaggtgcaagttattcaatatgtgtgttttagcagaagtgtctgtattggggaaaatattaggctaagagaagagacattgatggagccagcaccttttccccaagttacctacagatgagattttccctggaatagtaggtaggaacgtctaaatagtccttctatataaaaaagaaacacgggaccctctaagttacatttaaaacgtgcatttacctgcacagaaattaaatgtccaaatcctgctcctctatagttacaactctgtgacttccaaagagagaagtattccaagtagctgaagagagttgctagagattggtcttttataaccttggtcgcagtttcagcatgagagtgcagtgtctacctgaaagagcaaactaactacaacacccagcggtccttacaaatggacatcagactttgtcgggctgggaagagttagcactaggaaatttaagacagggctttctaaacagaatgtgtactagaatcccccagagggcttgctaaaacagattccagggccctaccccagggattctgatttagcagggtctggatgaagcccaagatctgcatgtctagtaagctcgcaaaagatgctgatgctgccggtcggggaccataccttgaatagcactcacctaagggacttccaaggccacaaagcactttaatcccatagacaggaagagtggagccatgccccggtgccagccctgccgccaaaagtcttctagacagggcagagaacaggcaggcacatggccccttctctaaaaggcactggaaagcttttcatattaaatgtctaggatgtctccatcctgctaacttgggaaccaaaagtaattgaaatttcaataattcatcaacatattagaagctaaaataggaaaattccctcaaagcaaattgcattcaatagtgcaacagctcaaaagtgcctaatgctctgccacggttccagtaacggaggatcgatggaaacgcttgctgtcctcaaaacagaccagacacagggctaaactcaaaatagcctaaagaataggaaaatatatccctgtagaagccaaatggtactgctgatgaaggattacaggactcgttctgaaatggtccctcacaaaccaaaaatgggtacaggggtggatacctcattatgccacaaagagagactgggcaaagagagagggctcattcatttcctcagggactgggggaaacctcccggtggagacttgcaacctccggtgaattcaacctcccggtgaatttcagtttttactgctgatgagtctgataaggtcctgaataattaacaatgttaacaccactccaaaacctaaatggtgtctgaattgcactcaagacaatcagtggtctgttcttagaatccctactggcctactcatctttttttttttttttatatctctatttaaaaaaaaatacagataaaaaaaatcctgggcaatttataaagacttcattaaaactatccatgttttaaaaacatttcttcttctaatcacaaaagtaaaacatgctcactgtggaaaatgtagatgacactaaaacataaaaacagtcaaagtgcttatgttctttcttactctacagaggcaatttactctaatcattttccttgctgtgtatgtgcacacatgtgcttaaaataatttctaaatctaaatatctactttcactttaaaaacttcggacccagagaatgtctttaaaaactaaagatgataaacatgtttattttgggctatgctttattatttaatgatagttgctagccagtggaaacaaacccagctgaagggagtgcagtgtgcctgtcagggaaagaaagacagctggttaagtggccttctcccccttcttttgatttgagagtgagaatcttaatttacaggaataaatgcaagaaactaaggctaaagccaatatgctgagtcagcttaggcatggcttcggaaagaggcagaaacatagttaatagagttctcacttttattctcacccattgtagtgggttggattatgtctcccccaaaagatatgtccaaatttgaatcctcagtacccgtgaatgtgaccgcatctcaaaatagggtctttgtagatataactaaattaacgatctcaaggcaagataatctgatttgggtgggccctatgtgcaatgactggtgttcttttaacagaaaaggaagggatatttaagacaaagacagagagacacagggaagaaggtcctgtgaagatgaaagcagagattggacacaagtcaaagagcaccaagagctatcagaagttcgaagaggcaaggaaggattctctttcaaagccctttgagggagtgtggctctgctaacaccttgagtttggactcctagactccagaactatgagagtttgtagtaatccaaatactccttcttcattgaagacttatttttttgagacacggtctcactatgttgtgttgcccaagctggcctcaatctcatgggctcaagagattttcccgttttagcctcccaagtggctgggactacaggggcatgccactgcacacggctatttttattgaaggaattatgtttctctctacaaaatatatattttggagtcaagagatagccaagaaccagggctaacctgaggcagggactgacacttgcgggaacatcattcagcacccttcacagcctttctcaactggggttcctcaacaccagaacatgacctgagaggctgttttttcacttctcctgaagttactgcgtgtctggtaaacattatgatgggaaacatgctctgaaagaggggtatcaacaaggagtgtcaaagtgcagaagaagaaacctggctggcctctgccttcctagagcaggcaacgctagaactcaatcttgaaggctgaactgttcaacaagcaaataaagaggaaaagataatggggagactctggaaggttcaagtagggaaatgacattaaaaggttgcagttgttaccctctggtatttcttcaagggttttgtaaaaatcatttgattagaggagaaaatggactgaagtaaggaagaaaaagttggtgagccaagagctctactgatggttcagataggaaattatgagggctcaaatacagtcagcgaagtgggaataaggatggcaaaatacactctagaccagtactatccaacagaacttcctgtacagacggaaatgttctagagtggcactatctgctatggtagcctggtgccacacgtggctgtaagcacttgcaatgtgcctggtgtactcaaggaactgaatttttaattgtattgtattttactttatttaaattcaaatctaaatggttgtatgtggctagtagctactgtacccatcagtgcagttctaaaaatattcaaggaggtgaaaaaacaaacaaaacacccaaacttgtagctggggtgattcagtggatcatggagttacttagcaatgagaaagaaaaacataaagagaagctgatcttttcggaaagaaatgaccagagctgacaatgtccggagctgacaatgatatcagctttggacatgctgaatttgagaaaacaactgggtatgtaagagagggcttatcagtcaacaattagagatgtaagtctgaaggaaagcaattagaactggatagatagatttaggaatgctgggcatggataaggtccaggaaggaggtgtggcagtgtggtgggcagagtgcctgtgtggagctggcaggagtggagggtcagtggaggacagggagatggggacacctttttctcggggagaaaaggaaaggaggtgaggacgggcaataacaaacgtgatttgcagactgtcaggggaagatgcgaaacagggactcccatctgatggcttctattttctctgctaggcatgaggggggaatgtcagaaatgagaaaggaggctgacctaggaccaaaaaagaaaaaaaaaaaggaagcttacacagcagcactgacagctcagttgagctctctttgaagacagtagactgaagaacacattgttttcttccaactctagagacctcaataaataatagtacaaaataaaaaaggattaaaaccacaacggagataagaatgtgcctggggcattggccgaaacaaaatttggacacgttcctcaacggccaagtgaaaagaagagcactgatgaaagacacagaataaaaaaagtctataatgtatacaaagagaggcagccagtctacccagaaggacgatggcagactctaattcagctttggcagagagcaggaaggacaagaatgagaacagaggctttcagaggttaacagaggttgcagctatgtaactgtacacaacaattgaaacttcccggcatatgacagcttcagctaaagtcaacaggtgctcctattaaaaatgcatagaaatcctgcattaaaaaaggaacaatgagaaataaattcattgccaaggtcaaaagacagcaaaatctccagatgccagaaatgagaaagaaggctgaaggagttgccaggaggtggtgccaccgcaagcccaggggctgtgagcagggcacagaatgagagcgtgggagggaggagatggagggcgcctgctagtctagctgcttgagctgatccctctgcctcacgcctggagcctctctgctcgacccataggtgaaaagctgaaagtgctgtccacagaaggaatcctgaggctgtgcagcggagtcaaccttcagaaaccaaaaccccagaccagtggcacctttgggtgtgaggtccaaatttatactatctgcatactgtgggactccaaacttgacatgaacactggaaactggtttggattttgccaggccacccactgcctcagaaactgcctaatttgtaaatcgcccagtatcaagagagaacaggagacttaggcttcccatgactgggagcccaggtccacaaagctgccagacacagagtgaggacaactacagagagcaaaagataaaacaagagagccagcagtctgaatcaggagctgaattcaccctaggggaaatgaaaataaagcaactggtaaaccacatcacaataggtacactgaggaaccttaaagagataaggggaataatttccttaagattaagaaataatgaaacaaaaatagacaccaaatcttaaaagccttcttgtggggctaggcacggtggctttggtggtaatcccaacactttgggaggccaaggtgggaaggttgcttgaccccaggagtttgagaccagcctgggcaatagcgcaagaccctgtctctacaacaacaacaacaacgaatcagccaggagtggtgcgtgagccagtagtcccagctactcaggaggctgaggtgggaggattgcttgagcctggcaggtcaaggccatggtgggctaggaggatcacaccactggactccagcctgggtgatgcaatgagactcagacacacacacacacacacaccacacaaacacacacacacacactgccttctcatgggatagaggcatctcaggttctgtgggtctgtgggtgttgttctgtttcattcactactgcattgccaacaccttcaacagggactgacacagtctcaataaaatctattgaatgccactaaaaaacctatcaccttaaaatctaatgcctacttagaatattgtggtaggctgaatgatggcccccaaaggcatccacgccctaaaccccgagaaatgtaaatgtagccttgtacggcaaaagggaactgagatgggtagagtatcatggatcatctaggtggactcagaagtcacaagacccctctaagagggaagcaggagtgccagagttagagctctgaagatgctatgctgctggcttgggagatgaaggaaggggcatactcaaaggatgcaggctccctctagatgctggaagcgacaaggaagtatattctcccctccagcctccagagagatgcagccttgccgacactttcattttagtgaatgagatgcattttggacttctgaccccctaggactgtaagatgataaatttgtgttgtcttaagtcactaagttcatgataatttgttacagcagccacaggagattacacagctattatcaagagtgtgggcaaaaataaagaccctctcaaagattaagaatctatcacctatagatctttgctgaaagaatttcctaagaatacatgattttcagtaccaaagaaaattaaacctgagaaaaagaatgagatgaaagaaacaatgaaagtacaagagctgacactgacgtaggtggtgaaatactcctttgctgctgttgggcggatgggctggccagatttcccaaaagctgccctggggtacttggtcaaagcaagactatacacactctgagactcagcagtttcactcctggacatgtgatcctgagtaattcccaccaggccggaggagacatgtgcaagggactatgccccggagcattgtttgtggtcatgggaaatgggaagcaatttgattgtcagctgctgtaaatgcaataggtgggtcactatagaatgctagatgtccttagacacacaggaccagatgtacacacagccatatggacaaaccttaaaatcagagtgctgaggagaaaaacataagagaaggcgacagcagagtaacatttaaataaattaaaagtaatgcaaaacactatcttaggacatgcacaaaatggggggaaggggatgggatattatatgggataaattatttgcaaggaataaattaaaagagggaccagtgaatgtgactagtgaatataattatcttctctctctgtcctgagtgccaaattacaacaaaagccaggcatggtggtgcgcacctgtagtcccagctactcaggcagcttgctatgcaggaggatcgcttagcttagaattcaagggtcgagcgcactgtgattacacctgtcaatagccactgcattccagcctgggcaacatagccagatcccatatctatcttatctatctatctgttgatctctctctctctctctctctcaatcaatccaaaagaaagtaaatgatgcaagccaggagcataagggattaggcagagtgggaaagtgagatgttggggggatttggccctagagctgtcaaacacaaagagtgtgcacagaagcaggtttccaaagtggtaggaaattccttggaaacgtgaggctaggcaagtatgagacaggtcagctatgcggatgcttcaatctctgagtacaattgtgggagcacagacaagagtcagctgatgaagtcatctgtgaatgtggctcacagatgagtgacaagcaggaaggcaaggtggcaccagagtcctgagcaggatcagaaacatttttattagccataaaagaaagagcctgttctgctgatgatacgtagcagtactcactgggtagttgtaatttcaggcaattaggctgtaattcataatttcactgtgtaatggagctggttgagatgagatgattcccacactatagaatggtgagaatcactaggctgggaaagttctacttaatgagcttcatgcagttagtccctgtgtagtttttggaaagctgctatctcgaagtccagggtttgtagatattttgccgagaaccacacctcttattggagattttatatgatttttcttagagccctcaaataatcagaatctatttacagcaaatatttatttctttctataaatcaaatttacatggtgtttcaggatagtggtattttattgttaatggcaattttgactagatggaaacagaagagagagatcacaaaatagaaggagaaaacatccaacagcatttccatctctcggtaagtttgatatgtgtgctattttctcttttgttttatagcccactaaagtacctggatgtgttataaaaatggttgcattggaaaaggccagcattttggcaatcttccttttttttttttttttgagacagaatctcacacgttgcctaggctggtgtgcagtggcgcgatcacggcttgctgcaacctctgcctcccgggttcaagcgattttcctgcctcagcctcccaagcagctagaattacaggcgcccaccaccacgcctggctaattttttgtatttttagtagagacggggtttcactatgttggccaggctggtctcgaactcctgaccttgtgacccacccgcctcagcctcccaaagtgctgggattacaggcatgagccaccgctcccggccaatgttcctaatttcttaccagctttttgacaaattgagtcagcttctttcatgacagccaagagctagccttgaagcagcctggcctcctcataggcacatgaggctggggtgagtaagcaaatactggtgcccacagcaggagttgcctcacaatctccgtggctcaagtgtgtgtaaggccctcatgaagtaactgggagctgtgtccatggaagaggtcaaagaaccagggttctggggattctctgccttggattccccctaaaactccctcagtctacagagaggaggggaacacaacactggactcaggtcaaggtaaaagcatgcataccaccagcttcctattttctgcaacaagctcagtgtgccttcatgtagcattagaatgccaggagagtgggtctgtgaaaccctaaggaatctggcccccatgttgctgtaacagaggacattttacccactgttggtctgcatgggagtggggctaggatgaggacaagggtggacagaaggctacaggaaagtggtctaaacaagagaacaatgacaactgcctcccctaataaggccaccagatcccaaattttggtaccaagagttaacatcaacgtagacttgggcaagattgttaaagcttttgtaggcctctgttttcccatctctaaaaagggtataataatagtacctatcagctaggattctggagcagattaaacaaaatgtgcataaatcatcacccatcacaaataagtgtttgaaatatgttctgggctattatcataatttaggttttcaaaattatttatttttagagacagggccttgctattattacccaggttggagtacaatggtgtgatcacagctcactgcagacttgatcacctgggctcaagccattttcccacctcagcccccgagtagctgggactatgggtgcacaccatcacacttggctaattaaaaaaaaaaaaattttttttttggtagaacagaggtcttgctatgttacccaggctggtgatttaggctttgagtaagtcccgctttgcctttagaggtatctgattttaatctggggggtgtctagtctgagaggagttcagtctgcaaatattcacagaatgtcaatactatcaatattattaacagagcctttcttaaaaataagccctactgagcttgcactggtaagtggctccctgtggaagtgatttccttcatggggtgagctgggggacttggcactgggccaggcagtgcctccatgccttgggagccccggggtgcctgtaccctggtggactccaccctccctccacttctagctcagatgaccctggtgaagggacagtgcagggcaggctccacatagcaggcagcttccctagcagatgccgggcttatcactgctacatggtgggcccaggaggagcaggctgggcatgaggagaaggcagaaagcctgtagctctttctctcagttcacctgcagaggggaagtagaggacacttggagaagctcttggcccatgtccagtgggtgaccaaaggacactgcctctcccttccttgtctccaagtgctgaccacaatcataatgtgggggagtgtgccagggtgctacaccccatttactgactctggctcatggaaaggcctgggcacacatcctctcaaagagcttcccagtgattctgacacacacgtgtggggtcaccacaagatggatgagtgaaactgcctgtttctctgcaactctgattcacggccaagcccggctggtatcatagtcaaagcatgtaaatcagctgcatcagaaacttgtactgttgaatatccacatgttcctaagcccctttatggttaggtaaagccatctgcctagttctggtcaacaggcagggcgcagaagcatttaaatgctgtggtgggagcctttgagtgggctcttaggtggtggatggccaacagtctgagtttctgagtgaatgtatggatcagagacgtgcacctgtcccctaacctgcactgaatatatggtgcaggcaagaaacaacgtgccatgccactgagatttggggagtgaacctgttattgcagaaaaatctagcctcatactgactaatataccagccatacaaaagaagagccacctgagcctcccatgtggaaggagcacactgaagccagacctggctcctctcagctccctcccatgcagctagatgacagctggggagagctgagaggagcggtgttgagacaggacttggttttacagaacttttatgaatttaaactcagctaatattggcatcctcttccttatcctgaaaagaaattcccatgaagaaatggaacaaataagaaatgaacaaagttccataaaggacaaaaaagaagactcagcttatatgtgaatatcaaaccattaaaagctgtgagatacagatcattctccataatccatacttttttgtttttgcttaatttgaaaattaaagaggacaaagaagaaaaaaagcaatcgcatacttccactgcccagatttaacctgttaatattttagcatatcagtgttctatttctatgtatatacttctgcatattaaaaattatacaatgatatgaatacattcattaaaaacataaattagaacattatagagaagtttaaggtccctttgaggccaatacaacatattaccattatgatgttggtttatatttttctggtctattttcaatatttttatatacatacatatgaatatctatgaaatggaaatttatacagctataaattcataataaatataaagtactattttgcagtctgcattttctctatatagccctgtctcaagaaaagcaacaccaaggggaggtagagtgggaccagctcagacgggactatggccaaatgaggctaaaagagatgtgagggaaaacatagatgtctctttatttaacctctgtaagatcacaacacttacacttccaggctggtctcaaactcctgggctcaagcaatcctcctgcctcggcctcccagagtgctagaagtataaacgtgagccaccgcacctggccgagggtgacttttatttggttcaaaatagcatgtctacttgtctcttgaatttactgtggcaatgaaaccagaagccagacccccaggatgagagaggcccaggagagacagatggaactcattccaagacatgcagaaaatacccaggtagagcacagtgtgtaaagaagaaattgttaacaccttatgacatgaacatgcagaagaattctgtaaatctgaagaatttctagaaaatctcagaaggaacttatgtggccgatttgtgttcaagtctatggttcagcgggacacagtttcatgtgcctgtggtcatatcaagtttgctttgccaaacacattggggaaagcgctgattatttttgccacatcatggctgacttaaacaatgtagctaaaaaaatgggaacaatgtggagaaagtggttcctgccatcacacgactctctggggagctctcagggcactctctgtgtttacctgtccccaccacttgacataaaccttgcaatgatctgtttacttgcctgtctctccaacatccttgaagccagggactgtgtcctgttcatcactgtaacccctctgtctggcacagagatgaccaatcacgtttgtgaaatgaatgaatgaagaataaagtaattcctttacagagtaattctcccttgcctacattaagcccaattctttatgtgtgaggaaatacatggttatatcacagagcaaacagaaataaatgattgcctcattcagtaatgaactaggaccaataataaaattgcctgttgctccttaggtactgctctgccactagcccaatttgttaactgactacattaaagatctaatttaattaaatcttgaacaaagctcagaagacctacagagagcactttgcttaattacaggcacggttcaagcaccaatcctattgatctggtcggttaaaattctatacaatgaatgtgggcaaagaaaaaaagaaaaagaaagtggccccaattgctcgtcaaggaactttgatgaactatggattcagagctgctacaaagacagcaaaggcaaaccagccttgtactctgtactgtcacagggtaaaaataaaatggtacctcagtcactctgcagagctacacatcgtcaagaacagaagacaatgacaaccacgaaggacagatccctcctgagggaaataaagcacactaggtgggtgggtgagtgacggctggaagaagacttttggcacttaaagtctagtaaacaggcattcaaatgcatctagtacactttttgagatctacactcatcttgaaataaaaagcaataaatccaattcatggtatgtatataaattcctgagaatatctctagttgaggaagagataaaagttaacattatttgaaggtaactgaaataaaaattatacaaaactatactagttgcacaaacttataaaaggtaacagatgtgactggaagaaaggctttgactaaaatgtgtctatgtgtgcaggcctgtatgtgtgtgtgtgtaattatccaatgtccatgttggagttcttcaaacatctaaggattcctatttaaaaaaatgacaggatggtgttcaactttccgtatcactcgacaggtaactatatattttactccaaagaactactactaattttttgagcatttactacgtgccagacatcgcctaaccactttacgagtattatctaatttttgctttgggtgctattattgtcccacttcgtggcagagtaaactgaggcacagagaggttaggcaacctgccaaagactcgtggtgacttggcaggtcaggctgtgcatgacccaggcaatctggctccagagccctggtacctagtgtagtgcctccgcactgtgctattcttaatactgacctccagagttggagaaaacactggaaagtggggaaggggactttttattttttgctagtccaccatgaagggctggcaagtgagagaagaaaattcattctaaaccacaatatgtaattacaccaaagaccaacaatttccctcacaaaacatgcaccatcagaatgcacacactaagagcaagtacatacctaattaggacatcagtgataatcatcggggagtgtaacccaggaaattacaggtggcgtgggctttagtgctaagcaaatttcatcatgctgcccagataaagcctttgctgactgggatgatttacacctgctgatgcaactatggagactgtcatccgatatagctgcatactgaaaatatgcttatgcacgtgagttaagacaaaatgatgttcagatatgagaggtagtagtgccagccttttaattatgacattagcacaaatgaagaagagttgataacattcaaaaatagtaatttcttccatatttttcaaatgaggaagagttgataacattcaaaaatagtaatttcttccgttttatataatggcaactaagaatacttacaaatggattaaaaacaaaatgatgtacacatcctgagctcgttgaagcatagaagagcaagttatttacaaggtcttttttatggctaagggagcaagagcaatggtgaaggatgatgagacccactagatgtatttttcccttttttttttttttttttttttttggacatggagtctccttctgtcgcccaggctggagtgcagtggtgcgatcttggcccactgcaacccccgcctcccgggttcaagcgattctcctgcctcagcctctcaagtagctgggactacaggcacacagcaccatgtctggctaatttttgtacttctagtggagacgggggtttcatcatattggccaggctggtcttgaactcctgaccttgtgatctgcctgcctcggcctcccaaagtgctcggattacaggcgtgagccactgtgcctggccagtatttttccccttctaagtcaactttatctgtgtacaaaattagcagtcagagcacaactagaaaacaagcttctaatattgccaagaccaagaaagagagtcaagtaagtctagtaattcaaagtgaagttctgagggaagtgtttgattgaggaattcattgcttcacccccagtccaatcacagatcaaactcacagccaaacacagaagtgcttgtgggttcctgggattaaaaacttcaccttggaaaaactgaggctttaacaattctgccgaacatttctatcctgaaacattagctccttcagtaatggatacatgtcctaaacaaaatgatactcaaactaggtcaggccctagggtgaatagcaggagtcacacatacacatctgtaaacacagagacacacacataacatgcacacttaaacagatgcacatacacacatacatatatgcacacaatgtacaagatatggctattttaacttcagtaagtctgcaccaggagagacgacattctatactagattcagtataagcaaatgagagcaggtacaataaagctaaataaaattttatagaaaaaaattaaaaaggtaaaattccatttttttttttcaaattctaaagactattagtttatcctaaagaacattttaattgagcttagaaaagatgtgcttaccctggaaagtttagaatcactgccccgatgtaattttatcaaccagtcagatttaagattccagagaaaagtgtttgctttttttttttaaatcttacctctataccttagcaatttcgaactactttcaagaaggacttcataacaggaaagagacagtgattcccaaaattacaaatgccacaaaattctcacggtgcccctggtgctatacaccagcctctctcagccccatgcccaggaagggcctgaccattatggatgcagcatgctcaccctcctccggagccggtcccgctcttcccggatggcattcatggtggccttagtccggttcagttcttcctctttgctgcacagcatggcagtcaggctctcattctcttccctcagcccagccagctccttctcccaccgagacctctcttcagccaggttgggatacaggtcccggccaagcaccccctcaatctcctcgactgtctgtaaaacacagccccaaagaaaagtcaagtaagttaccttggagaaaggggataggaagaaaataggctgaacaggaataaatgtccatagaggagtgtgttctagaaccactttgttataaatagtgatcatgactacagacaccccaaagttatcctgtctccaatttcagatgaggctctgtcacttgcctggggtacagtctgtgttacctggcaaccttcagagtaagaaaaacagtgagtcctctcctggcagctgagtctgtctgtggtgctagctgacacatccacacaatgcttatttccttcacttgagttccagagttggtggatacacacaaccaggcagaaggccatttagtgatcctggtaatgtgaggacaaacatgaggttgtaaactgcatacaaaatctaacttgaagtttcctaaattataggcctcccacatgccaactcagcgataagataggtcacattaccatttccagcttttagtgccacatccaaattcagatggtgcaaatgaggttcagtctcaagatgtgaaagacaaaaataaacctcattgacacagaaaagaggaagctcattgtggagatttctaagacagcagggattaaattaataatacagcttcaaaatttaaaggaaaatcttagtagcacatagttttaaaaaattcatttaaaaacatttaatgaagaagaaacatgcatattagggaaaaaaggaagaagtcattctgcttactcttataaactgttcattcacatttactgtcctttgaaaaaggaagcacaagccagtggataatgaaacaagagggagaattactatgaagaggtagaaggcagtgaagagatggaataagaaacagaagactggccgggtgcagtggctcacgcctgtaatcccagcacttgggaggcccaggcgggtggatcacctgaggtcaggagttcaagaccagcctgacctcaggtgaaaccctgtctctactaaaaatacaaaatttagccgggcgtggtggcgcccgcctgtaatcccagctacttgggaggctgaggcaggagaatcgcttgaatctgggaggtggaggttgcagtgagctgagatcatgccactgcactccagcctgggcgacagagcaagactccgtctaaaaaaaaataataaaaataataaaaagaataaagaaaagaaaagaaacagaacgcctccaatactaaaaaacataagggtacatcactcttggatgctcatgttggttctcaaatcttgctgccacttttcccatgtgctgctttgtccttcctttaaatctggagactctcatcctacttggctctgctccagaccctgtggctttgtccctagctggttggtagaggcccttggcctcctccttccctctcaactccgaggttggggctagacccaagttgacattacaatcaaatatagggcccaggagattccagagaaagaaacaccagcaattgcttctccctgccctgaactacatcaactacatatttgcaattgagatgaagaaagatggaaaaccagcagtgttacaaacatgcatcgtggtttaccttgtgacaccacagttcttttgtgcaatccaggattcctacttatagaaacttgggcctgcattttctctttatgggctcctcctagacttttaaatttgaattgctatgcccaggtcactaagttacgttgaaggaatataaagataccagaggcctagtatcagtaagccttgactttcccatcattcacaatgagtttgtgcagatgcaacaaattcctgtcaccatctcaaacagcaagaggaattgatgaatggactcctgaaatcgtattctagaggccttagagctttaacaaaacttccaagctaaacttacagcttacgagtggctctatgatgaaccactctaaaatgacgtggttcaatactagcagtcgaatggtttccaagtaaattgtcctttttaccgcaaagccagtgaacctgactgctgacatcatgactttttctgaaataaatcagcccaaccaaaatttctagagcccccgcttctacaccgtggctcaatctattgtatggctctcatggaaacattcatccctagtaagtatttaagaaaactgcacttcaagagaaggattggaccatttccctttcagaacctcaaagggcctcacagagggtgaggaaggtctaccttaatagccaggtcacagtgctcgctggctgtggtgagctgctcaatgtgcttgtccacctcggccacggagaggctgcagctgctcttcttcctgccgcagacaacattctccagccctgtcagcaccctctgcagttctgagttcaggtcactgcagttgtctgtgagtgaatgaagacaaaatgcgttacacagggcaacaaatgctgtctgttttgcttaccatgagggactcattcaggtaatgggatggcaatggagcctgacatttcaaagttcaacaccagccagcctaacctcacaggcactgcctctgagacttggagccaatgcaaagctctttttattaaagagtttcagatgatggtcattttctgaattctcttgtctttcactcaaagcagccacatcttgagtttctttagtaagaacaaagaaatgcccagaagaggctgttggcacttccagagcctctggtcaacctgtctgctgtcattcagacaagcactaactgcagaaagatcccataactttactaaatgtaacaaaaagtctcagaatgagcagagatgctaggtattttgaaaaacagaaactgtgtaagagatagtccttgccctcaatgagcctaaaaccaagaacttttccatgatagaaccaatcaatatgctccactgttgcaatttaatccatgttctttcatcagggggaaaaataaactgttctaacaaattccttattgttctccacataaggcaaccaattctaataatttgattttgacttaaaaacttgggttgctttgaaccgctggacatccagggcctggtcagagaaataaaaaataattataatgtgattcagatatatcttagaagacaattttgttgggaagaaaactccccttaaagtcaaatacaaattttgtaacctgctgttttggattctgtctatcgccatgccattcaattattgttgcagggcagatgctgactgattatatgtaatctttcagagtacattcttcacctacgtccagcctaaccctgcatgaaaattgctcagtgtcttccattttcttcttctctcctgcatgcttctcaccacaggttccatgtactaaaatggttaactgcttttgggacttacctttggaagacttcaagaaaactcttggcacaacaggaacaggacttctcagaatgttttagtcaacctcatctggttgcctctatttgtaaattacctaaatctagagagatcagcctaaggctttcactccaaccaatacacacaactagtctacctacttctcaaacctgttcctccccgatctctcccatctccatgaatggcacccctatccacccagttactcaggtgagctctgaggcaaccttctatgcctttgtctgacatactaaatccaattcatcttgtgaccacaacctccaaaacttatcctcaaactgacctcttattaccatctctactgacaccatcctgctctaaaccatcatcatctctcaactggaccactgtaacaatctcctgcctctactctccacgcggtcaccaaagtgggcctcctaaaagcgcaaatcagaacaagttattttcctagttcaaactgtctaatggcttcccatcaacattcatataaagtcccaactccttaccagagcctgtaaaactctgcatgatcaagactgatgtgctcagttcaggctgcaccatgtccctggggagcttttataaactacggatgcccaggccccaccccagaccaattaaatcacaatctctgggggttgggcttgcacaatggcaactttaggttcctcaggtaattctaacgtgcagtcagagtgagaaccactgatctgatcttgcctcacccatccaccttcccctgttcactatgccccattcacactccttcccctcattcactatgccccattcacactccttcccctcattcactatgccccattcacactccttcccctcattcactatgccccattcacactccttcccctcattcactatgccccattcacactccttcccctcattcactatgccccattcacactccttcccctcattcactatgccccattcacactccttcccctcattcactatgccccattcacactccttcccctcattcactatgccccattcacactccttcccctcattcactatgctccattcacactcctggccttcttttttccccctggaatatgccaaactcctgtctgctccacaggttcctttcctttgctgtttcctttgtctaggctgattttttaaaattttaattaaaaaaaaaatacaacctttttagagacagggtcttgctctgttgcataggctggagtacaatcctgtggagtacaggcaggggtacaatcctagctcactaaagctttaaactcttgggttcaacctatcgtcccacctcagcctcccaagatgctgggactacaggtacacatgaccacaatcagctcatatttttatttttgtgtagacacagggtctatgttgcctgtctcaaacttttggccataagcaatcctcctgccacaggcttccaaagtcctgagataattgacatgagccaccatgcctggccaaccaaatttctacatattgttcagctctcagctcaaatgctatctccccaacaagctcttccctatctaaagcatggagtttcacctcctcccttacccattccctatcttcttatcctatttttttcatggcaattatcactatctgatctgacttacatgtttgttttctctcctctactaaacgtaagttccaggaaagaagggactttgatcttcctcatcatttgtatctccaacagagaatagggtaggcggtcaaatattattttttaaataggcaaagagaaacaccacatcatcatttatttaatagacaggaaggctataaacagactcaatagtagcatgtttttcttttttttttttcttttttttttttttgagatggagtctcgctctgtctcccaggctggagtgcagtggtgcagtctcagctcactgcaacctccacctcccgggttcaagtgattctcctatctcagcctcccgagtagcttggattacaggcgtgtgccaccacacctagctaatttttatatttttagtggagacggggtttcaccatgttggccaggctagtctcgaactcctgacctcagtgcttttgttccttgttgtggacctcgacctgagctgctaagaactaggatgctcatcactgcagaggccctttggagatggaggcaggtggacaccaactggaggcaaaggacccaagtgaggagaagaacaactcagagaccacaccaaccagcctctgaatgaccacgtaccctctggtgcaggtctcctggtatccagagctggtgtgaatccgctgtcctgagttatgtgcattaagtgctcatgagtgagatattcatgaaatattcagacattctgtgctgacttccctagcgcaggtccacctgatgcaataatgacaatggacatgtctgctgaggggctctcacagcagagccggagtggtggcaacaggctgcttcctgagggtgctgggttacagggagcaggaagaggggctaggcatgtgactagtatttccttctcatacttaaattgggcagttgccgagccctgactcaggccagagcagagtgcaaagatgaataagagactgaccttaactgtgagagacccccagaagtacaaggccactgccccacctctctgctgcccaccactactgtaaggaaagtaaccatagaggccaggcgcagtggctcactcctgtaatcacagcactttgggaggccgaggtgggtggatcacctgagatcaggagttcaagactggcctggccaatattgtgaaaccctgtctctactaaaaatataaaaattagccaggtgtggtggcgcacacctgtaatggaggctgaggcaggagaatcacttgaacccaggaggtggaggttgcaatgagctgagattgcactccagtctaggcaacagagcaagacgcaacactctatcttaaaaaaaaaaaaaaaaaaaaaaaaaaaaaagaaaggaaagtggccaggtgtggtggctcatgcctataatcccagcactttgggaggctgaggcgggcagatcacgaggtcaggagtttgagaccagcctgaccaacatagtgaaaccctgtctctactaaaaatacaaacattagcagggcatagtggtgcgggcctgtaatcccagctactcaggaggctgaggcaggagaatcgcttgaatccggcaggtggaggttgcagggagctgagatcgagccattgcactccagcctgggcaagagagcgagactccatttcaaaaaaaaaaaaaaaaaagggaagtaaccatagataacacagtgcagacacaaggcagagagctggcaagatgtgaggtcatttacactgatgcacagactctgaagaatatctacccttcaaaccaatgagggctacacatactttctttggtcataggaagctgaatgtataaaaacacaggtgaggtgatgaaccccacaaactccagtttgtgctgcagaactctgcactgtggcttcacacaggcccatcagtgaccagttggcacttgactgtccattgctatttttccctgtttggagcctcacaggaggacgaggagactgggccgcctggagcaggtattctgtgtcccctctcaaggtactacgtcaaggtaccaagcacttatcaccactcaccgccagcatccacatggctccagacagaactgtctttcagagtctgtggcataaggtgccacagtaggtcctaagtataggagtagagttgctggatcatatggtaattctatgtttaacaaaaacaatgaaaagcagtgactcaaataattgtaccccgatgttcatagcagcattattcacagtagccaaaaggtggaagtagcccaggggtatactgacagatgaaggaacaaaatgtggtctctgaatacaatgtaatgttattcagccttaaaaaagaaataaaattcttttacatgctacaacatgaaccctgaaaacattatactaattagaataaatcagacacaacatgacaaatatttccactaatacaaggtatctagaagacgcaaatgcagagacaggagataaagtttaccggggtgggggtgatgcgagaatagggagttattgcttaacgggtacagagtttatgttggcatgaaaatgtcctggaaatgggtggtggtgatggtcacactaactctgtgaatgccactgaactgtacacttagaaatgattaccatggtaaatttcatgtttgttaccacaataaatataataaatgtatatcagtgagtaaaatgaggagatataagcaaataggctgatatgaaacagaaaacggtaaccttcaagaatggcagcacattcagaaaggatttgaagtattgtaatttaattaaaaaaaattttcccctgtgggttggagagcaagagaaggaagaaagagatatgggaagtctaaggacaagggggagtaatgtactctttagaaaaaccctggcccccactgccatgcaactccatgaagggcagctgaggcaggcccactggctttctccctcagcctctgctgtactttatttttttattttaaaaatcttttttttttctccagagacaggatctcattacattgcccaggctaggaacgaactcctgggctcaatcaatccgcccacctcagctccccaagtagctggggttacaggcgtgagctacctgtgctgtgctttatgcatcaaaggaaactgttctacatccaggagacagagaggaggcctttggtagcaaatacacattcctttaagtttatctgtactgtgcccctttctaaagaagaatttgaggttgcttatcacaagcagccacaaataaggggaaaacacggtgactggatcagggaaaggctgggagcaaacggaggctgacacagcagagggctgactcctccagctagccttgagcatcctggcatcctcagcaaatatgaattatctcctgacagaaaggaggaagcattccggtttcacaagggagacaaggtgtttttggcaacagacgctagaaggatttaggtacacggtacttcatacgtggtgtgaagtgatgtgatgccagtctcctcagccagtttcacacatatgtggatttcatatggtttcttcttatgttaaccttcagttaaaattaaagttgtagaccatttaaagcacaaggtaaagggaactctggggagtgctaagttcacgtaatcttggcactcagtcttcaaagctgtctgataagactgaacaggacccagaagactggatggaatggacctctccctttggccagcagatgcaaaccagccacctgcagccaaagatgtgcttgcatatgggatagggctatggtgtctggcatggccttttttttatttttaaaacagtttttgagttaactgtcaacattttaaaaattgttaaaatttatggctatccttgtaaaatgagaagatctggcaatgcggggcccagcttctcaaccacagccatgtgcagaggggccagccgcagaccccaggactcagcacgcccaacccacagtgctcctctgctctgcccgcctccacccaagtccatggctcctcctgcccttttcctcttttctaaatgcaattttcctcagttggcctcctgataagagctcaataatacacagctcaggttatatttttctaaggagaaccagagccttaggtttttatgttgctgtttggggaaagatccacatatggcaggtcctcaaataacattttgttcaacatcgtctcattataacatagacgaggagggaaacaggtattcccagctggggccactgtctgtgtggagtttgtacattgtcccctccccatggctgtgtggtttatctttgggtattccagtttcccctacaccccaaagctcagcacgttaggttcattggtgtatctaaacagtcccagtcagagagagacagagacagagacaatgaatgtgtgtgccctgcgatgggatggcacctggccggggtgggttcccatccagcaccctgagctcctgggataggcctcagctacctgcgacactgacctggaataaggggttaaataattatctcccttatttttattaatctgccttaaatgtacatatagttcaagtttattcccacatttaatattagaagtgctttgggtctctatttagaaattcactaacgtttcagtgaccacaaatacactacaggaacttaactcttcattatatcaattaaccataaaactggtatcgttacacgtcatttcatttaaagttgcattttccaggaacctatcaacgacgttgaggacttactatactttggaaatctggaaaggaggtaagaggacattcatggctgtgaaaactaagaatcctaatgagccttctggcttagttaaacacacaccagtggacaaagctggttttcttctttcttactcaggatcagctatgcctatgcccagagctgacaccattaactacggcagagttggttcattttgaatcaggtgttaaaagttgcttttttaaacaaacaagccctgtaaaaatcctaactcaaataaagggcagctccaacaggtgagatgttacaaacatctcccctggtccacctgattccaaccaagcagtcccctctttaccagaatgactttgctccaaagtatggtcccagcttccaaaagcacgtgttcctggggatcggtacttgcttcacactagtggttaggtatttgcctagtttggaagccttccatgctgggtctttattaagctttgcctttgatagggcttgggtttgtgtccctacccaaaaaccatcctgaattgtaatcgccaatgttggaggaggggcttgttgggaggtgactggatcatgggggcagacttctcccatgttgttctcatgatagtgagttctcatgagacctggttgtttaaaagtgtgtagcacctcccctttctctctttttcctccttctctggccatgtaagatgtgcttgcttccccttcaccttctgccgtaattgtaagtttcctgaggcctccccagtcatgcttccggtacagcctgtggaactgtgaatcaattaaacctcttttttaaataaattacccaatctcaggtagttctttatagcagtgtgaaaacggactaatacagccttgaaatctcattttccaggaagccttcccagccctttggcactcagccctaaaagttgatgatttcattcattcaacagtgtgtttccagagactcacagtgctgggcatgtcccagagacttacagtgctgggcatggaacatgtgctctacaaacactggatgagattaacatgtaaaataaatggaagactttttataagccaactttttaaagtcccaagtttttgttaatttacttgttaatccagtgtcaaatttaaaacctatcaaatgacattatcacagcctgctaatagggcagaaagctttcaattaagattcccaaggtagaaagctgtcagtgaagttagagacataagtcacagagaattttagccaggctaagaaacagaagcagctgtaggcctgctacgatgtgggctatagcaggactggccattcaccatatccctgccaccttctgagggccagcgcacaccacccacccttcttttctgactgggcacacaccatgcctggtaaagcaattcaaagtgggagaaagacctacagattctttcagcctcaacacagactttctgtaaaggcaagatgttatatcccagggatgtaatagttcagatctcgttgtagctctacggctgaaaccaggagggctgttgctttcttttgagcattcctctgtactctgcatacagcaaggccctctttaattccatcgaggaacaaacacaaaccgaacaaagtaacatagaaaattagaaaacagaatagtcaacttttagggttgaacaccaaagagaagactgaagggtctgggaggaagggagaaagagtatccacagaggttaccccttgctttgtgtcccatgttgcctctgtctacctaagacaagaggacttatgagaacaatgttgtggtagtttaaaaactcctcagtatcacctataatggacaaactgacattaggaacctcccgctgcaacatggtaatgaggaccataacccacatatgttcttgcaaaaaaaaaaaaaaaaaaagctaacctcaagtcttgtaagaaaacaatcagatcatcagattgagggacattctatgataccactaacctgataacactaacctgacgtcctcaaaatggcaatgtcacaagagacaaaacagcaggagggaggatctgttctagattaaaggagagtcaaaagacatgaaaactaaatataatgtgtgagccttgactggatctgggactaaacaaaagcaaccaaagacattaataggacaattggggaaatttgaatatggattgtggactgtcaatgcttcatcagtggtaaaattctcaggtgtgatgaaggtactgtgtttattataggagaaggttccttcttaaaaggtttacacatatgcctttagggggtgaagcatcatggcatctgcaacttttaaatggcttagaaaaaaacgtatacacaaacacaaatgggagcaagagagagaaaaaaatcaaaatgtggcgaaatgttaacaattggttgattaagatgagtggtttatggaggtttgttttaccttttctgtaagtttgaagatttttaaaataaaaagttgagaaaacacatacttcaacattctaggcaagaaggtctcacaaggtctggatatgctgcagtggagatttaacacggagagcgcaagatgactgattctcagtgcagccaccagaactggagagctctcctgtaagtgtgtcttccacatccaaatgatcaccaagtacacaggcacaagttgacagggacaggaggcagagaaattctaggcagaaaagggcaaggtccctggcgaagccccaccctgaagcctataaccatggcccaaagtgagaacatgcaaccttttttccccactgaaatgctgccttttcaaaaatcacccatggcctaccccgccccccatcctatacccataaaaactctgaccccactggcagagagcagagaagggaagaagaggagaagcagctggatgtcagaaactgtggtttgatgtcagagagcagcagcttgacttcagagcgatggcttgacaccgttgcttcggagaggagtctggctggggacagccagaatccaggggaagattaccttcccgttccatcccccttctagctccccttcctgctgagagccacttttattggcaataaaatcctctgtattcaccacccttcaattcttcatacgacctgatttttcctggatgccaaacaagagtttgggtgccatgggcgcagatgctaaagggtgccacactgaccctctgccttcagtggtggagagcaactgcctcacatgaaaaggcagagggcccactgagctgcttaacacttaagctgtccacgaacagcaaagcaaaaagagcactgtaacacatgccctctggggctttgggggtcacagatcctcccccctgagacgctactgtggggccatcacggagttttgctcctgctggtgctcaaaagcacttgttccggcccctgcacacactcacctgtgtgctcctcctcccttgaggggttgagagctgcagcctgagtaagcgaggcacccctgtcacgaggcctgagaaggggtcaagaaaaatttcctatttcaaagtcagggtgggtgacctgagaagcgaaagacgccaccccaccacattctgactatagatctctgtttcttttctcaaagcaatcgaggctgcattttcaggacttctattttagtaaaatcttaccagctggggatttgttttcattttcactgttgtcactttagatttctgacacaatttgtttctgtgaaacaacaaacttggtcataaatatgaagggataaggaagataacctaacatcaactccagggagctgtcctccaggactgcgagcctctactgaccttggtgcccatctaggatcccctgctctgctctgttacgcacccccacataactcctagtcatccacctccagcctcggtggcagaaaagttccgtcagtggtttctgccagaacttttctgccagaaaagttctgtttcacacatatgtgaaaagaagttcaaatctacgtataatcattttacttatttgactattgatcacctgaattggcacagctttaaaataagaatgatacccagttttgaagaggatgagaggaaatctttggggtagagaagggacagcaactgacaatatacaagaaaagacttaatcattcaatacctttgagaagtaatcttgaagaaatagttacaagtatgtttagaggataaattccaaccccttcactgtgcctccatggctctctgtcatcactgaccacagcccagctctcaggcctcacttctgcccactctcccccaggctcactaacctccagtccaaatggccctttcttagtgcctgggtcacctgcggcagctccagatcccctttagataggctgtctcctgcccttgacagcaaacagtggatcctccattagcactcatcccaggccctgtgaccctcatgctaacaggagtgagaggatttccacgccaccaggaggagggggaagatgtggttctggcatccatatgtgatctgcaaaatattttctcatagcagcaatgttcacaatgatggctggggatgcggtaacaacactagcaaggtcccgaagttatttccatgacagattacacaggctttccaaggctggtttcaggagctaacactcctttattataatgctggttttaagaaaaattatgtcatgaatttcaaataaccaaaaccaaatcaaccttaaaagacatggtctatttagaaaataaagactgtttatgctattaatagaagagaagttcatgaatcccaagaattgtgggagctcattttgagtaaatgctgtagattaatgcctttccatttccatcttataccccaagtctcttttggggactgaaaagttatggaacagcagaatttggggaaaatattccaaagtaacacaaactgaagtagaacaataacctttcctgctctcaaccctggttactctaaggaagattctggaatgacttcagggggttctcctcagtcacttagctctgctaccatttgcagacaggtcttatttgaccaggctcagatccctaggagaaaacacacagtcaccccagagagtgctccagtgaatcaatgttcaaactgttaactggttctcagggatgatccctattgtgaccctctccagagaaattaagttgcccacataaagaaaagaaaaaggtaacaaagggcttggcctgttacatgaactagttagagtacaactttcagtccggtctaaccctttcagtctgtggactagaggatcactgactatctagccacctcattcctagcaaaaagtgagtattctccagacagcttgccttacctgtgtaaacacatttctccaggtctgcaaaaactgtttttggcagaggcagggctgcctttccctgccccgaccctctctcctcactctgagtggctgcttgacacttgtaaacattttttcctgaagccattaagcctcatcagccagtaagccaggagaatctggctttagcatcaaacatatttcacagtcacaaccgcaccaaaaaaccaggtttcatgtggaaattcttccttggttgtcctccaaaacctattcacacagaggaaaaatctaagtgatcacaccagaaagcaaggtattctatgcataggacaccttgcgggtataagagtagatttcaaccctaagggtataaacctcaaccctcagggtataatggtttgatatttcaaccttgagggtataatagtttgatattgctaaattccagaaaaataaaaatttctcacccaaaatcagaagagatctcaaaataacagaatgcttcactggctgtgcaaaggcccataccatcagggattttgtttgttttggaaacagttgctccagaaaagcactgctgttgcgttaacagaggtggggaaaatggtccacaggaaaggacagcaaacatgctgtaacatgcaggatgcaatgagtctgtgtgcacacatctgtgctctgctctattgcaatacccagaatcattgggtccaagagtgttgtttctattttaatatgaagggccgcaaaatctgattgcaaatgcttcactattaagccaggtgcttgtgatcacacagctgctccctaattcccccatcagccctagagacctcaaaggactgcagtaagcaaatgacatcaaccactggcatgtcttcctgtttaaaccgaggagtatcaaaggaaagccatctatagaaacacaggcggcaacaacaaaaacaacttcttggctgtgtggccttggacaagtgacttaccctctccaaacttcattatcctgattttacagatgaagagacctccagggcatccttccaggttggggattaaacatgagggatgcatgtaaatgcttgacacagggtaagtgagcaaagcatgttagttggtatacccaccctctcttttaacggcgagcctttgccagatggaggacataaaaattctaagcaataactcctaccttggctttgtccacttaattacctttattttctgaacaatgtgtgacgaggtttgataagaggtaatttttttaaaaaaaacatgcagtgtgacagaggctggcacctttctcctttatttgactgcttagtaagtcaaagcactttttaattggatcgtttattcctccaggcttggaagacagtgtccaggaaccagcctactgaaggggcagctggactctgatgggtggttatgaaaacaaaagaaaagtgctttttgatgaagctgataggctggacttagtcctgttatctttggagatcggcaaatacactgcagcaaattctgcagctcaagaaaacctctgggttgctaatgcaggtttgcaaatatagcaactataatgaaatggctacttttaaatgatttcctataatggtgcttacatatggaagcttttttcctgttgaaaaaatttaattggaaaatggcgaaggaataagaagagggagacagccagttccgatgaacaaacacactgacggcactgtgtgagcagctttaatgaactcctccttgttgtgcccaagtgtttgtcctcctgggggatctggcagagctgcccctgcccggtgcaccctcctcctcatgggctccgaccccactcagttcccagattcctgctcggctgtgacctctggcaagcattcttccatgctcctccccgaggttatcaccagggccactgcaggcctgctatggagtcctaactgcactgtgaggtcttccctgtggacctgtctgcatcctccaaacaactgtgagctttgggatggggttctttcactgctgctcaagtatttgagtatctcctacgtgcaggaactgctatgctggtaaattaggcaggtgaagtccctgcccgcgtggagcctgcactctggcatgacagccagataaagcttgataacacacaaggaaatgagcacaaacacaatccatcctcagggagtgctccatgttatgaaagaaaatgaagcagggaaagggaagcaagtggctgcctgagagtgagggatgaggcatgactctagaggggagggcggggggccttggtggagacagctgccgaggaaggagggctccaggcggaaggaacagccagcacagagccccgggcaggagaagcagctcaggctggaggaacagcaagccaggaggccagagtggctgcagctggaagaaaaacaggacaaatggccaaggaggcggccagaagcagggaccgccctgttggctgcgtgctgaggaagctagaagtcactctaggcttgaaggatttgagggtgggagcacaatgacctgacagcagattctgtctttcatccccagtacctagcacagccccaagtgagtttgctgactaaatgaaaaaaaaaaagcttctatgtgtgggcagagaacatgtgtcaacactgggcagggaaggtcactcccctccaggaactcagtcttctcaggaaagaggctaccaccagttataattaacccatgtatttttaaatgagggacggaatgaaaagaatggtttgggaaaatgaggatgccccatggcgcagataggtggacactgccttctgtgtgaggaccagtgcaacagacgccacctcaagtcaggaggtccaagaagccccacaggaaagacatccatgtaaatgtgtttatccttgcacttcccaaacttatttaattatggaactttgttggagtacaggtcatttattaattccataaaatacaatttgagagaagtgaatggcgggatcagtatagggctcacattctacaatgataagcaatttctaggctgtttaaatctgtctggctaaggcagaagacagagtcctgaagcttggggctgccagggttagagatttatgatgcccttatgaacttagcatgttggtatgaacttagcatgctggtatgaacttggcatatgcatggtctggttgcagggagttgtgtgtattgtaacataaagcccggggactgggttcagtttagttgggggaagtgtcttcactcctcaacataattctgcctggcttaagctgtaccaacatacagctctcaatggctttgatgtattttatttggccttagatgcaatccagactactgatcgctccttccttattagagcctcctctgccccactggcttccagaataccactctcctcattttattccttcatctttggctggctgactggtggattggtttattacctcattcattcattcccactactatctttaaacacatgttatgtgccaggccctgtgataatctctgaagatatactaggagatgaaacaaacatgcttccgcctagtggaatttagtgggagaatcagtcaagcaaataaatactattacataatttaaaatgtcaacgtgatagtaagatacaaatggggcaatgacagagtcaacagttatcatctgcaaacaccctgatgtctcccagctgcttttcttcagcccaggtctctcctcttggtgttttatctgaatgcctactgccttctgaagcacctccgctcaaatacttcaagacactataaacccatgggcaaacaaaacacgatctccacctatcatatagttcctgccccaagcaaaacaaaactcaaagcaaaaccacctggtcctacttcctatgtgccctattggcgaatggccctgttatccatctgttgtacaaacaaactcttatggggcatacacaccccccaccttcaatcggtttccaatccttcagcaaatcttgccaattttacatctttattaaatctcagctgccaccaccctaatctgagcaacaattttgcccatctagagttctgcaatagtttccaagctagcctccccaactcattcttcatctatggattctttctccacactacagtgattgattcaaaatgcaaatctgattatctcattctcttcccccactattaaaaaatctttcagtagcttcttgtggatctttgggtaaaggccaaacatggtctctgtcatggcctgtaagactctgcatggcctagttcctgcctacctctccagtccccctctcacacctctgtgtcctccatccatgaggatcttcagtcacctccttaaatgcattcctctccctcactggatgctattctcttccttgacctgcttaattcctactgatcctccagctctgaggtcaaacgccttcctagaggaagccttcttgtaaccctagactgaatcaaatttctttggatacactctcatagtactgtgttccataatgttgtagcacttataggattttaattaaacccaaatatgtaatatttgattaaaatccctctccccaacaaaattttaacttccaagaaaaactcattataaaactcaagaaaactgactatatgcaactcttctttctcctggttcttcttccatctctcccatacatgtaaacatgtctgtcctaagatatgctgctcctccctcttttgactccacacccttcaaccacagggatcaccttagctcagataacttcaaagcctcttccctcaacctcgatctctttccaaatatccaggtaggcaagaccagtagttttgtaacattttgactgcaacccagttagaacattcatttggcaacttactgcctacaaggatgcaagaaacaaatttcatgaaacaatactgtcacttgctttcctattagccttcatttaaaaatactttttcatgtaatttcaagacccaacagtaggtcacaccctgcagtttaaaatacatcataccagatatttacacatggatatttctctacaacctcaaacataatatgactatttcccaactcacttctcaacacaacttcctaaggaatatatgatcattctcttagtcacttaggaacaacacattggagtcattttggattcctccttcttgcccaatccaagtagttgttaaaacctattgggattcttccactgcaatgtgttggcccccatcccatcccttcccttcccaccatcatagttcagatattactgtaatttggaatactgcaatagccttttaaactggttccctacttccagaattttcaaatagaagtgacttatgtttgaatcacaattgtatcagagcagaaagcttcagttccattttgaccaacaaagtaatgtgtaagggactgaaatacatgtgacttcatccactcagcaaaccccttgaaaaattaaattttaattcaggctgcctcacatttctaaaatttctattacaatccagaaaccaaactctggcttggtggcaagggcaggcagactcacccatgtcagcagtaaccatggtagactggttttcggggatagagacagaggtctggtcttggtccatgcttcgagagtcctcgttgacctcgtgttggctctggctgagttctgatcgcagttctgagtactcatcttcctccctgagaaaaaaggagaattggcaaccactaacagaggatataagacaaccccctagagaatatgtcttttaaggacaagaaaaagacattgagagagaaaacagatttctcccccaggccacagggaccaggatttctcccaggcgaaatagatagtcacatctatgctcagtgagtgaagctgaaaggttgcctctgtgtccacaaaacatacccatgtaccaaacgagattcatctatcagcctgcagaaactcttcccctttaaagattcctgaagaaactagatttcttcgcctcctcaaattccgaggagaataagaactaaggctactagcactgaggctgctgtgaaccaaataactaagagtctagcgcacagcaacagcatgccctacaatctggaggggcccacaggggcttccttcttgaaggaggctggaggttggagatggggttagagctattgggaaaccagcacctcatctgtgcagatcaaactagacttttttgaaaggtatatggatcagcatgtataagaaagactaggctaacttcccaaagaaagtaggtagaactagggggtaggaagagaggatgcaatgaggagaaaacagaacactgaatgagagaacaccattcaatggtctatttcctttaatttacacttgctaacaggaagacaacatttaaaccccactgtgttttatttgtatacacacatctacctcttctcagcccttcagaggtccctcaacctctggtctcttcactgtactattagcaagctgagaaacttagaattgcagtgtgtatttcagagcacgtgtactgtccccttcccacaccaccaccatcaccacacatacactggacacaggtatggagacagcaaaatgaaccgtctttgaaggatctattttgcaagtgaaccagtagggggaactgtcaggggatttaactgggagtggaatgcccacttgggtctgctcagcttcaagggcaggttgtctgtgaagaaagctaggaatcagagaaatctcagcctggcattcattttaagttgtcaacaaccagaggagaagaaagtctacagtgttggattctgggtggaccaaaatgatgagtggcgatcattagggtttagggaggcaagcgggagacacatctataaatcagagaaatgtgaagaacagaaatcttggttctcttaagatatcaaatttctcccaggaaagggattcagctgagcccgtgctttataaggtattgttaataaaacctacccagaaaactgggaaagctttatgtagatataaagccccatgacatggaaaatatgaattagagagtggtgaagacaaaaaatacaggctaatgttctatgaataagttaattattagacatctgcaaaagtcaacaataattaggtttaggaaagaaaatgattaaaaagcactcttaagtgcctttttggtctacaggatgattgtgcactgatagatacattagctctcctttcagtcagcacttaaaattctgattttagttaagggagattttgtgtatgatgaataaattacctttgttgcatggccaacgtaatcagctttggctcagccgagacttttttgcagccaagaaagcaagtgataaatgctgctgctgtttctttggtataaatggcatttgtaaaatctttaatagccaccttaaacctggcttggcagattcgaaaacatatatttcctgccaaatctcctgctttgtacaaaattacttctagagattactaggatgaactttataaagcagtgaattgggaaagtatgggaaagggaagctgttattgcagaaacattccctactgaggtcagagcacagtctgaaggagaaccataccacattaagcagtaggttttctgtgtcacaaaatgcaaactaaaaattcccattcaatgtatttgagcaccaaaacaaagataggaacacaaagactgcacagattctgtcttcaaggagacaaagatgttcacaagaaggatgctgtgggtgaacactggtggaatatctggggctgccagtggggagtgaccaaagaagacctcctgggtggagcagcgctcaagatcagttaggacctaatttcagttacgtcacaagtgtggaatagcacaggcaaaggctcagaggagctgggaacgtgcagaacttggaggggagcaagtggttcactatgactgaaaccaaaatatggcacaggatggaaacatgaggctggagaggcactcatactacttgttgactaggcagtgtgagcaaaaggaaaatatattgcaccggaggatgcaaataatcagggttagatggaagaaataaaaatacaatgtggaaagtctaggaattcagaggaaggagtaaatgttgccaagatcttgtgtggaaacagataaaatgagaagaagagaaatgcattccagctatggtaatcattataagtattctagaacaaaaacgacacatggcaacaaagtaaatagtcatcagaggtggaaagctaccttgcgagaacagggaagattttgtgccacaaagagtgaggtataaaaatgttaaactgagcttaaatattagaaagttcatgcaccctgttgtgtctcccactgactttggtaaaaaaatcatggagctgcatatccttatctctcattggcatcattcctgaaagggggctggaacctgggaccgggaaatgacaaaagcaattctcagagggtcctctgtaaactaactcgatttatgattgcagtatgcgtggcagactgcatcaggagtattgttccatcaagagctatggagtaagtaaaaaacaccaagagtccctggcagttttataaagacaagattttgagttgtgcttctgcagtggctctgcacagcctagaggatgcctggtgaggctaatgacacagcacaacagcatctcaagatgacttctgtttgttgtatatacaggcattcttctcaagcaataacttatttctttggggaaaaaatgcctcccaaaaaaacaccaactgctattgctggtgatgaagaagaggaaaatgtaaaaacatggaaaaaaagtgtccatttaaaaccagaaaaatagcacctctgataaactgataaatgttgaaagtgacactctgtagtggtaggtttataataatggaatgacaaagttctcaggtgtttctccttggaacataaagggtcaactcacaggattccaaatgcatattctttcattcatgtagaagcatctgcgaagtgcttccaagttgctttaagagatgcaaccattaatgtttgctcctagcttaaacaacaacataacaaatgttcctcaggagacaggcattagattgtacacttgcctatgtaatgaccagcagtggcagaaaaatcacaggctggcagactggaagggattttaaagactgttttagccaggaccactacctttattttacaaacaagataaatggggcttcgagaggcaacttacctaagattatgcaaccactagcacagcctaattcctaaatttcataccaatgagacaatatgtacttgacctttgaacaacatgtatttgagctgcatgaatccatttatatgcaaattttctttccataaatatatttgacaattttctggaaatttgtgacaacttgaaaaaaactcagatgaatcgtatagcctagaaatacaaaaacaaactttttttaaggtatgtcataaatgcatgaaatatatacattaggttgatgcaaaagtaattgcagttttgcttttgaaagtaatggaaaaaaccgcaactgctttcacacaacctaatagatactagtctatgtgttaattgactgcttatgttatccgtaaggcttcaagtcaacagtagactattagtagttaagtttttggtgagtcatgagctatgtgtggatttttaactgcacagtgtaggggttggtgccactatccctcatattgttggggttttttaaactcttattttaggttcatgagtacatgtgagggtttgttacgcaggtaaactcgtgtcttggggggtttgttgtacagattatttcatcacccagcccaatacccaatggttatattttctgttcctctccctcctcccaccatccacccgcaagtaggccccaatgtctgttgttcccctctttgtgtccatttgttatcatttagctcccacacacagtattcagttttctactcctgcattagtttgctaaggttaatagcctctggctccatccatcttcccacaagacatgagcttgtattttttatggctgcatagtattccatggtatatacgtaccacattttctttatctaatctgtcactgatgggcatttaggttgattccatgtctttgctattgtgaacagtgctgcaatgaacgtttgcatgcatgtgtctttatagtagaatgctttatgttcctcttggtatatacccagtaatgtgattgccgggctgaatgctagttctgcttttagctctttgaggaattgccatactgtttcccacaatgactgaactcatttacactcccaccaacagtgtgtaagtattcccttttctctgcaacctcaccagcatctgttattttttgactttttaatagtagccattctgactggtgtgagatggtgtgtcactgtggttttgatttccatttctctaatgagcagcaatattgagctttttttcatatgcttgttggctgcatgtatatcttttgaaaaatgtctgttcatgtcctttgcccgccttttaatggggttgtttttctcttgtaaatttgtttaagttccttatagatgctggaaagacctttgtttgatgcatagtttgcaaatattttctcccattgtgtaagttgtctgtttactctgttgatagtttcttttgctatgcagaagctcttaagcttcattagaacccatttgtcaatttttgctttgttgctattgcttttggtgtctttgtcatgaaatccttgcccttgcctccatgcagaatgaaattgcctaggttgtctcccataatcctcacattgtttgagggtcaactgtaatgtcatgactgaaggaaaagatatttcattgtttattaaagattccttctcattattggttaggggtaaaataatttaatcagaagagggaaaagtcaatggaagtataattcttactatgctatctagacttcaagctgaaagtactatggagtcaacagcatttgatagactgtcatgtcactaactatccacattatctatctcattttgggtgcacattcatgccttccattggattggaatgatttgtggagaagagccagatggtcatctgcctgctttgacagctgtcaagctgtcagtcagctgtggccaactaatccaccctacttgacctggtgttttttgggcgaactgcattctttcttaaattaagagtagacttgcctttaaatggctggctttcttttaaagaacaaagttttttgttttttgttttaaagctattggaaggaaatgtattccttttagttctctgaaagaatctattacatacaggaaataagtgatgaataaagtcctcgttctttcttcaatactatctcctcttattttttcagatagcatagagaagatcagactcatctatgaatcttttggtgaataattgaacaaatgggattttgaaatgctctcctatgaatataacaatccatttttgtcttaacaagagctcatataagatccatattcaagaacttccaaatattaaaaaagagattgatacagaccacacaggaaaacagggagagagaaacactcttctttctgggttttatttttatttcattgcattatactttttagactgtaaattaatcagaacaacatgttttgctggcagacaaggaggttttggttacagtttttgaaatgcaacaacatgaagatgaacagatgcctgtgtgttttgttggctgcatgtataccaagatgtacgtgataccaacaacacacaggtaactgtgtgcccaaagatcaggagaaacatcaagctcctagtgcaggcctgaaatcttagtggtcagattatattacagtagatagagactctgggatgttttctctctctgtcctcaaatgagggggcattttgtagcagacccagtaagcagaagggttgagtgccaatcctgagatcacagagataggaggggtctgtgccttggggctgctgctgtatgaggttaaaggtgtgagagagagagtttaggataggagcccaggctgaggacaaacttggtggagggaagagaagatcaactgtctgcagggtcctagaggtttaagaagagtgccgtcaggaaggaaagagggcctagggtcaaatgccatagaaagagaccaatgacaaaaaaagtcactggatttttcatttaagaaatcattggtgattttcaagaaaggtgtttcagtcagctcaggctgccatgaaaagataccatagacagggtggcttaaacaacagaaatttattttctcacagttctggagcctagatcctccaagatcaaggtccagcatggctgctttctggtgagggctcttcctggcttccagatggctgacttttccctgtgtccccatatggctgggaggaagagaatatacatgcaagccgtcttatgtctcttcttaaaaggcaatacaccaaaaaacaaccccatcaaaaagtgggcaaaggatatgaacagacacttttcaaaagaagacatttatgcagccaacaaacatttgaaagaaagctcatcatcactggtcattaaagaaatgcaaatcaaaaacacaacaagatactatctcacaccagttagaatggcgatcattaaaaaggcaggaaacaacagatgctggagaggatgtggagaaataggaacacttttacactgttggtgggagtctaaattacttcaaccattgtggaagacagtgtgccaattcctcaaggatctagaaccagaaataccatttgacccagcaatcccattactgggtatatacccaaaggattataaatcattctgctataaagacacatgcacatgtatgtttattgtggcactattcagaatagcaaacacttagaaccaacccaaatgcccatcaaggatagactggataaaaaaaatgtggcacatatataccatggaatactatgcatccataaaaaagaattgagttcatgtcctttgcagggacatggatgaagctggaaaccatcattctcagcaaactaatacaggaacagaaaaccaagcaccacatgttctcacttataagtggaagttaaacaatgagaacatatgggcacagggaggggaacatcacacactggggcctgtctggggatgggggcaaggtgaaagacagcattaggagaaatacctaatgtagataatgggtccagcaaaccaccatggcacatgtatacctatgtaacaaacctgcacgttctgcagatgtatcccagaacttaggtataattaaaaaaaatgaaaaaaaggcaatataccttcttgagagcctgctatggtttgaatgattgtcccctccaactctcatgtagaaatttcacccccaatattggagatggagtctagtgggaggtgtctgggtcatgggagtggatccctcaagagattattgcccttccttgtgggtgagtgagttctcactctattagttccttggagagcgagttgttgaaagagcctggcacatcatccctctcaggccatgtgatctctgcacagccggctccccttccccttctgccatgagtagaagcagcctgaagccctcaccagaagcagatgccagtgccatgcttcttgtacagcctgcagaactgtgagccaaataaacctcttctatttataaattacccagcctcagattcctttctagtaacacaaagggactaagacagggccccactcttctgacttcatctaaccctgattctctcccaaaggcctcatctccaaataccatcacaataggggctagggcttcaatatatgaatttgggtagggggaaccacagttcagttcatagcaagagggttttggtaaactgttggagtcagatgccacacagcagcagtgagctaacgagcaaaggggagatgaagcagagaacatgaacaactcatgagacttggtagtgagaggctgatgttatgagagtagcttatagaaaagaaaataacctccttgggaaagaaaagatctcatgtttaatttgcttagaaatccttttttattttcttttcacatccagtgagctactgatatatttttccatttcccccatcccactatataatctccccaagtcaggtgaacatttaaaaaaagccacccataacagttaagagaaagagcacatattacaaaacagtgcgtgttatatgatcagatttgtttaaaatattcatgaatacaatttttcagaaggccttatgtataaagtgtttagtgtttaatcctaggagataggatttaggatacattaggcagggttcagttaggaaaacaaactgcactgcatgtttcaagtagaaaggatttaacttagttccatgcctgcaaaattgctgaaagggctgcagaaaagagaggtgagtaaaggccaccaagagctgtcagatttgccatcgtggctgtgatcccctcagagatcaggaactgctactgactttgcaccaccacagcctgagggagaaaggttcccacctccctctgccttccaaacccatgtgagtgcatttcatcggcagagttaaaactctatccagaacccagctggtaagagaatctgagaggtagttcccaggccctctttgattctggggagaatagaggggtgggaatggtatcaagtgccagacaacagctatcatagtctccaccctctttagctactcagtgaccaaccatatgcaccctcttatccataccacaatttctaaatcgcaatagcaatgatactaaccttctctgtagtcattccttgattcaatttaaataggttcaacttttgaaaatgagagatccaaagtaccatgatttatagtgtgggatataagcgtttttttaaataacgattaattttttattttctaatttataatttttttcttttgagttttctattaactggaactttacaaggattcaatttccttaaaattttaaacattattcctaacaatagtattgtaaagtgatcttcattcttccagttcaatgacaaacccacctagatatcatgtaacctacctattaaattatgagtttcaccagtaccaactcaccctatatgaaataataggagaaaataagaggaaaaagaaaagtgcatatgtgtgtgtgtgtgtatatatatacatacatatatatatacatacatacatatatatatacacacatacatatatatatatatatacacacacacacacacacacacacacacacacacatacatatatatatacaagcaagaaaatatgcacagcctagccatcttttctgcaactggtcatgaggctatagctgatatttataacttccctccactgggaaatccatattttatttgtttggctagcatctcagctggttagaattagttctttacttaatgaagtaatccaaaatctttattcctcaagggcctagcccttagtggactgacttgtatttggcctgacttgtattgggttgttctaatctgctaacttttaccactggataattactggaaggtatcctagggattcccatgtgtttcagacatagtactcagtgtcccaatttcctcttgatagttactccagccagtagagtaactcccttctttgcttgttggctcagtggcatggggtgtcccaaagggctaaacaggtggcagtcaatggaatcatttttgtattctctgatggagaactccctaagatttcaaactagcagagctcaaagttgcaaaaataagaatctataactttcttttttttttgtttttactgataccggatagatacgtattttcagggtacctgtgacattttcatacatttataatgtgtaataatcaagtcaggataactgggatatccatcaccttcaacatgtatcttttctttatgctgggaacattcaaattattctctagtagctactttgaattataaaatattatagtcactctattgaattatcaaacactaggtcttacttcttctatctacctatatttttgtacccattattcaacctctcttcatccccctctcctccctacccttcccagcctctaataaccaccaaaatactctctatcttcatgagatccacttccttagctcccacatgagtaagaacatgcgatatttgtctttttgtgctttctggcttttttcatgtaacatagcaacctccagttccattcatgttgctgtgacaggatttcattctttttttttttatagctgataatattctattgtgtgtatcttcatctattcatctgttgataggcactgatattgatttcaaattttggccattgtgaagtgctgcaataaacaagagaatgcaggtatctcttcaatatattgatgtcttttcttttggatatatacccagtaagggaattactggatcatatggtagttctattttgagttttttgaggaattttcatactgtcttacatagcagttgtagtaatttacatttctgccaagagtgtatgagacttcctctttcttacatatccttgccagcatccattattccctatgctttggtagaagccattttaactggggagagagaatatctcattgtgattttgaatactttttcatttacctgttggccatttgtacgtcttcttttgagcaatgtctattcagatctttcgctaatcttttgctaaaaaaaatcagatttgttttttgtgctactgagttccttatattccttgccaatggacagtgtgcaaatattgtctcccattctgtagtttgtcttttcactttcattatttccattgctgtgtggaagctttttagtttgatgtaatcccatttgtatagttttgctatcattgcctatgcttttgaggtcttactaaaaattctttgcccagactcaatgtcctagtgcatttccttaatgttttctctgagtagtttgatagttcaggtcttatgtctaggttttaatctgctctgatttttgtatatggcgagagattggtgtctggtttcattcttctgcatatggatatccacttttcccagcaccatttattgaagagactgttctttcccccattgtatgttcttggtacctctgtcaaaaatgagatgactgtagatgagtagatttatttctggattctctattatgtttcattgctctatgtgtctgcttttgtgccagtactatgctgttttggttgccacagctttgtagcataatttgaactcaagtagtgtgatccctccagctttgttctttttgctcaggattggctttggctatttgggctttttttttttttttttttttttgtagttctataaacattgtaggattttttttttcttctatttctgtgaagcatgacattggtattttgatagggattacattgactctatagatcactttgggtagtattaacattttaacccatttgtgctggagcctgaaatttttttgtgtgtgaaaaatcagacgttggtgatgaccttgagcagtaggatataaataactcccacaagcttagcgttccagtaatggaacactaggcataaatagattaacaatattaattcttccaatccataagcatggggatctttccacttgtttgcatcctctccagtttctttagagagaattttgtaattttccttgtagagaacttttacttcttttttttttttttttaaacagagtctcgctctgtctcccagcctggagtgcagtggcccgatctcagctcactacaacctccgcctcccgggttcaagcaattctcctgcctcagcctcctgagtagctgactacaggcgtctgccaccacacctggctaatttttgtatttttagtggagacggggtttcaccatattgcccaggctggtcttgaactcctgaccttatgatccgcccacctcggcctcccaagttgctgggattacaggcgtgagccactgtgcccagtcggtcttttacttctttggttaaatttattcttaggggccgggcacagtggctcacacctgtaatcccagcactttgggaggccgaggcgggtggatcacaaggtcaggagatcgagaccagcctggctaacgtggtgaaacaccgtctctactaaaaatacaaaaaaaaaaattagccgggtgtggtggtgggagcctgtagtcccagctactcgggaggctgaggcaggagaatggcgtgaacctgggaggtggagcttgaagtgaaccgagatcgtgccactgcactccagcctgggtgacagagtgagactctgtctcaaaaaaaaaaaaaaaaaaaattattcttaggtattttataatttttgtagctattgtaaataggattgctttcttgattttgtgttcagattcttcactgttggcatatataaatgctattaaaacccacctagatacgtaacctacctactaaattatgagtttcaccaataccaactcatcctatataaaatgataggagaggctggacgtggtggctcacacctgtaatcccagcactttgggaggccaaggtgagcagatcacctgaggccaggagttcgagaacatcctggccaatatggtgaaaccccatctctactaaaaacacaaaaaagtaggcgggcatggtggtgcatacctgtaatcctagctactcaggagggggaggcacgagaatcacttgaactcaggaggcagaggttgcagtgagcccagattgcgccactgcactccagcccaggcaacaaagcaacactctgtctcaaaaataaataaataaataaaaattaagtaggagaaagtaagaggaaaaagggacatgcatatatacataaaagcaagaatatatgcatagcgtagccattgcttctgattacaggctatagctggttacaggctacagttgatatttactccttccttctcctactaggaaatccttattttctttagctagcatctcagctggttagaattctttatttaatgaagtaatcaacaatctctactcctgaagaagtctgcttttagacctagtgatgtaaacagagatctgaaataagaaaatataaataaaaatagacctactgatggtacagctcatgggtgcaagacatcttctgataagattcatacatgcattgatattcctataggtagaattacttggttgaggactttgagtaatcgtagctctcctggtttaggagctgctgtaagaattatataagaatcaaaatttatttatttatttattttttacctgctaggagtgcaagcaaggaatcaaaatttaaacctttttagatctaaaatttagatttttgtagctattgtaaatggaattgacttatttgattctctgattgttattggtgcatagagatgctaaaatgattttaacgtgttgattttgtatcctgtaactttactgaatgtatcagttctagaagttttttgttggagtatttaggggtttctatatataagatcatatcatctgtgaacaggataattctgcgaacaaggtgaatttgacttcttcctttccaatttggatgccctttatttctttctttcctaattgctctagccaggacttcctgttttacgttgggtaacagtgatgaaagtgggcatccctgtcttattccagtctttagaggaaaggccttcagtttttcccccttcactatgatattagccatgggtttgtcataggttgcctttattttgagatatgtgtattagtctgttctcacactgctataaagaacttccctgagactgggtaacttataaaggaaagaggtttaattgattcacagttcagcatggctggagaggcctcagaaaacttataatcatggtggaaggggaagcaggcaccttctcaaggcagcaggatagagtgtaagcatgtgcaggaggaactgtcaaccacatagaaaaccatcagatcttgtcagaattcgttcttatgctatcataagaatagaatggaagaaaccagtcacctccctccctcaatatgtgggtattacaattcaagatgagatttgggtgggacacagagccaaaccatatcaatatgttccttttgtatccattttagggtttttatcataaagggatggttatcaaatgcttttctgtcatctactgaaatcatcatgttttttccttgattctgttaatgtggtatattgtgtttatttatttgcatatgttgaatggtatttgcatccctatggtgaatcccactcgatcatggtgaatgacctttttattgtgctgttgcatttggtttgctagtattttgttgaggatttttacctctattttcattagtgatattagcctgaaactggtgcttttgttgttgttgttgttatgcccctgtctgcgtttggtatcagggtaacagaagcaacaactttttaagtggatttttaggtgtattcataagaagggccacttccattctctcaatccacaaaacacagcaccatatactgttgctagttcggagcatttaccacatctctagggcattgaaaaaggttacctctcagatggtgccatcactaggtccactatgatttggattgagtccataatgcgacttaccacctgactttcagcaacctgcattgtctgattcttggctacattaccctgtagctataagggatgggagagtcttctagggtagtcacagaaggtcccaggcactaaattgcgtcccaaaattctttttttttttttctctgttacccaggctggagtgcagtggtgcgaccttggctcactgcaacctccacctcctgggttcaagtgattctcctgcctcagcctcccaagtagttgggactataggcacgcaccaccacgcccagctaacttttgtattttttggtagagaggggtgtgttggctaggctgatctcaaactcctgtcctcaagtgatctgcctgcctcagcctcccaaagtgctgggattataggcatgagccaccacgcctggcccacgccaaaattcttatgttgaagccttaacatccaatgtgatggtgtttggagacagggcctttgggaggtaattaggtttagatgaggtcatgagggtggggtcctcatgatgggactggtgccctcatatgaagatacagcagagagcttgcttcctctttctctcttccctccatgtgaggacacagtgagaaggtggccatctgcaagccaggaacagagcctcaatggggaaataattagcttgtgtcttaatcttagacttcccagcccccagaactgtgagaaatacatttctgttgtgtgagccaccttgtctatgatattgtgttatggcagcccaagctgactgatatgccttcctaagtccctgctctgacttgtgaaccacaaatattttgaagctccatgggttatcatcagtttagattcaatgtctagtaatctacctaagaatatggttctctcttttccccactgcacactctcccttataagtacctgccattctctttgaaggggtaaaaggaaagtttactgtactcacttgtggcatgattgatacatcttccccttcatccaggggactctggttctataactggcctgttatccaggtaagggaattggatgaggccatgattattcattgtgatgacaagtaaagtctctgttcaccagaccagagtttgactataatgatctagtaaaactttagtaggctgcccatttatatcagttctagagatctcaagcttagccactacaactatccctagcaggtcaaacttttttgattactattgtgcccttgttgaccaatatagtaaccaagcccacttcgactctgtttgttcagtggtaccaaggaccccattttaaggacattatctcccagtcaacatcgctgattcctcaggcttctaaactttttctagattatactagcaaagttctggcatttcaacataatttaatgcagagtcctttgttgagcctagttttcagttattcaaactggtgaatactagtttgattagtataacatagtaacatactcaatccagaatctcttacaggaaaagtcctatcaataaagtcgtcatcggtccaactgagttcctccctccctggtctagaacccttagttcctaatctcacacatgaattaatatgaacatatgaaaaaaagctcatcatcactggtcattagagaaatgcaaatcaaaaacacaacaaaataccatctcacaccagttagaatggcgatcattaaaaagtcaggaaacaacagatgctggagaggatgtggagaaacagtaatgcttttacactgttggtgggagtgtaaattagttcaaccattgtggaagacagtgtggtgattcctcaaagatctagaactagacataccatttgacctagcaatcccattactgggtatatacccaaaggattataaatcattctactataaagacacatgcaaccttcacctcccaggttcaagcgattctcctgcctcagcctcctgagtagttgggactataggtgtgcaccaccatacaaagacaccaaaagcaacagcaaaaaagcaaaaattgacaagtgggatctaatgaagcttaagagcttctgcatagcaaaagaaactatcaacagagtaaacagacaacttacagaatgggagaaaatatttgcaaactatgcatcaaaggtctatccagcatctctaaggaacatacaataaaacttccccgagttttattaaatgtaaattaatggaatcttacaaatcttctggtgctttacttgtatctttccaagttggattttctacttatctctttgggacatgatgatatttgaccacttttaggcctaaagataaagatgaatgaagtaggaatgggacatgattatatttgccacctcctacctgggatgaaatagttacagagtctccaagcaaaataggacttgctttattagatgaggagggagaattgtttctgtaggagggagagctcagtggaatttgtagtttccaggtatttgaatttatttgaatctacccaaatgtccctgttcaaattctcacgatttcaccttttcctaccaatgcttaatcttcacttaagagatctgacgtggccatgaattcaactcacattagcatctgcaacctgcagtatctgatttttggctacattagcactgtgactgtaagggatgggagtcttttagggcagtcacagaaggtgcctggtgctttgattgtgacctgagatagaaaactatgagattgtcattttctttccttaagcaattcaggatagcttaagtgtggatatatcatagcttatataaactatgcccttaataatgatttttagcttctccaataaattcttaactgaggccagatttaagtgacaccaaagtctacaatggtaccaccactgtgtctgtccagtatgacaagcaattctgtagaccgtgggtatgctagggcagttagagttcatccacggtgcctagttcctactgcatttggcccatcacagcatattaagagctgagactgtgatggttaattttaggtgtcaacttgactggattaaggaatatctgagagaaatgttaaagcgttgtttctagatgtgtgtgtgagggcgcttccagaggagactggtgtgtgagttgttggactcggggaagatccacccttagtgtgtgtgggcaccatccaactggctaggggtctggatagaacaaaaaaggaagagaaaagacaaattcactctccctcttcctggaggtagaatacttttctcctgcccgtggacatcagaactcttcctgcccttggacatcagaactcctggctccgtagcctttggactccaggacctgcacttgcattcccccaggttttcaagcctttggcttggactgagatttacaccatcagcttctctgttctgagcttttcaaacttggactgagtcatgctgccagcatcccaggatctcaagcttgcagtcagcctgttgtgaaacttctcagactccataatcacatgagccaatcttcctaataaatcccctttcatatctttacagatgtctatctgtctctacgttctattggtttctgtctctctggagaaccctgaataattcagaggccaaaccaatttgctggagtgctgagggctggggagatgcctaagcctcaggagctcagaggacaaggagagcctttgtctcattggtctacacgtctaagtgccttccagccttgcagggaatcccctcgaggaggggccagctcatttacataacaaaaactggcagaatttaatatgacatctccacagatgtagtcttcctttaaattaaaggcaccaataaatgtttgtagtcaagaagctcactgcatttcaaagtgaagcagtttggtcattacattcaatttaaacatcttgaaattgagatttctaggtgatgtgtattttttcatattttgtatttttcacaacttactgagcccatttgctttcactttctcaagtgtttaaaagtgcataaaaatcacaaatttgccagtgtcctatgccaggctcctttacatctgctataatcattcttttgggctaaaaattcttctctgctcatgtacttctaacctacaatcactgtgaagaccaatatacaatttaaaagccttgaggttctaaattagaatatgcagtttattgtgtggctccagctcagtgcaaacttttccacaattttgcccagaaaacagatgcccattagtagcctcatcaagaagccccgccattactgtgactcttggtgttggaacaaaatgcatccaaagtttcctctgacttctagaaggagagtttaaagtagctgcctctgaaactgttttaaaattgtggcttgtgtaagcatttggtgaacaaagtgctctttctccaaaaaggtaggtgccagccacttgctgtcctcaggctgttcccggagcatcgccaggaacatgaaaatgctctcatccacggcttagtgtcatttaaagcaaacctctcctctgaggaacagggcagatacaaccaactaatcactgtggcaggagacttagaggccaagtgattaataagtaaggaaggcagaatccctaccagttattgttatgaaaagaaaattcagtaaaagcagagatattctgggttctgacccacctctatcctctcctaattttaactacaaggcagtcactctctttaagctccagctttttcaccagtaaaatgatgggtcaaatctttccccctgccttatgagtccagtaagaggataaatccatgttggtagagcaatttgaggtaagctcaaaatataatcagattatctggaagcctacataatgcttagttataagctacattcataaatctctcaaaatctccaagggagggacacagtttgcatatttagtatcaacccagtgaatcaaagcagcagcagggatgctcgtctctaagatggaaggggctccatttagaactcatgactaaagcatttcactcaacttctgatttcatacccttatcaacaaactgaggaccacaacctccaccttgtctactttccagggctactgtaaggacccaaatcagaacagaataagggaggtaaaagcacatgattaacaaagcaaagagaaatatacacttcaaaagccttagatacaaagaaaacatcattataatctagtttataatctacaaactagaacttcggtcttggagttaaaatagttggggctacttcagctccaagatggagggtttagcagaaggggcagagtaaaagccgaatggagccgcgtacctgatggtggtgccttgcagacggtctatcttcttgttgagctccgcaatgacgctgtggagctctgtgatgcgttcctcatagcgaagtgtcgttcgctcctggacatcctcatgctctctcatgaggtgggactgctcgcactgggaataagggaaaaggacagaagtgctgatgaattcatgcacctacaggtggatgattccaagctttgtggccttaaaccattacaactgccaacactgagtatgccccaaataaaatgtatgtcagctcatcggctggcaatcccaggaaacatatcaatggctaaattttataattcccccagtggatactggagtctttgcctttctagcactccatctctctttgggaaacagtccctttgccattgcacactgtccaagtggggctattcaagtcccccactttcccgtagccaagaaacaggcaagtggtccaagctagatccatcagataccttctgcaggggatttcaatcttgagccaatggatgtaaggttgcatggagttgattcagaaagccttgaagagcatctctcttagttcctgctacctacagctcccttcccaagttcctttatggctgttcagtttccctttttaccaattcacccctcctttgctgaagtttgtcagggtttgtttcagctatttttcaaccaaataatcctaaatggtataataccacttcttatctggatggattatctgcaaatttaatgctttccaatatcattatctcccagactacaagctcctggaaggcaaggactaggtttctcattatttagcctagcaccggcaaatggcctggtttactgtgggtgatctaggagtgttatggaatgaatggatgacgatatatcatcgtcatgaaaactgcttagcagaaatagtgataaaagaggcagaggagcttcccttgctcagcatttgatggactaagaggcagcagagttatagaaacatttctgtagccagagtttaaatcctgaggaacctgttcacctctcacttctctccactgctctcaatcccttccagtcactgtgcatttaatctcatttacataataataaaatactcctcagtgatggaacaagtagcctagcttgcgtccttgtctactacactcggcttcgattaatttcctgtcagcagaggaactttaatttcatcttcaacaaggttttcttagtgccaagagccatatgtgctttccagcgttgcaggttggcatctccagtgagagtaggacttctcacccgctacctcccctgtccctccctaaatcagctaagcttccaatggcataacccagggcagggacaaaaggctttcaacgataaactgaacattatactaagcctaactccatactgaaacagaagtactcaacaaagaagtctgacaaataatctggtatcaatcatggtagggcctgcacctcaacaacagctggatcagtatttatgtaacttcctgggggttaccttggagctccagaaacaagattggaggcaacaaggttgttgaatgctttatcacagccttagagggatactttcaggaaaatactcatgtgaactactactcttagtgacaacctgaaacatcaaataacctccactccaggtcaagcacacaaaaaataagcgggaacaaaggcaaggatcaaggttgaatgaggggcacatctagtggaagctttcctaaacaaagatgctgtaaccagccacagacactctttccatgaagttaggcctttctcatccatgatcctacatacttaaggaaaaggagaagtccacaaaaattacaggatctcaaaggcatttctatcaataaatgaaagagcttcatatttctctggaacaaaccaagaacagaacactgttcctctcagacctgcagcacatctacaaactcttgctgttagcctctgttcccaacctcagagtgtgtgcgtgtgttcatgttgtatgaacatgtacagatgtagtggacactctcatgcaggtcaccagttccagatcttagtgtgactgtaggataaaattctgtctctgacctggatctcatcaatgctgtgactcctatgttcccatgttgcttgttcctcctcttttgttttccatattccgtctagggctacaaattactgtgaaacatttccacttacacactcaatgagctctcactttcccttatttctctactccttcttttttctttgatgtccttacaggtcaacaggccactaccaccacctgggctgacaagaaactacaaagtccaatgaacaatgaagatgttcaagggtttatatagagaaaggcacaccatcaataaaaaccaccaaaagaccacccttcagcatccctactgactgatatcaactgcctaaaagatgtaatcctggccaaccagcagccctcgctgctgctctgcctatggagtggccattcttttgtttctctaataaacttgcttacacacacacacacacacacacacacacacacacacacacacacacaaacacacacacacacacacacaaaagaccctgtggggctgcccaggataccagatggagagggagagcttgctctctggtattgcaccatccttcccctgcctctaactgagaagcctgcctggaggatacctgcatgaacaagaggcaacatgaagcctggtgattcagtcagatggaatagggcttgtagctaaaggaaaaaaagactcaatgtatatttgaagctcaagcactgatttaggagaagtaacaagaatatattagaggaaaaaaacctcctttaactaagggcaaaggtatttagtttacattcctatatttttccgtaagttttaaaaaaatagcatacaatgtagtactataatgtaatacttcctctacacagatcagacatttcttaaatgagactgtgctgggtgctacaggggaggtgattacaacacattttgaaggtaactgtggtcacagcttccagtggactgaaagaatcccagacttctcttctggagaacaaatacccctctgattcctgtttttgccatcaaggcactgaagctgttgcagctgcaatcttctctcctctatgtcttcctcccccagctccctgacctgagtttatatcctcttcaccatttacctaaaaatcttggctggtgccttggtctcagaccctgaaacgcctctgtgaactctagggagcatgaatgttaggccttatgataccaaagagagctaggaaagcccaaagagctctctcttcaacccccagagaggataaaaacagaaaaagagacacaagggggtgtaaaacagggaattcaaagtctctctagcttccaacaagccagctttagcttccaaagtcaattattcagtgataatttacttagcggcctctgggaccaaaggcagtttcttctactacaacttgtaagttagagactattttcttctctctactggacagagacaccccatacaatttcagctgaacaaaataaaaattggtctcaaataatatgctactgcttttttttctgtcattacaggtaattgcatccagggttcttcctcctcccagcccatattcaatttttgactgaaggtacagtaccacaaagccagaaagcctgtggttgcagtgtcttgcctgccataaatttctggaggccattatcattaggagtctagatttgtctcacaactacagactttcagtttgaaaggaaaagaaaaaaatgattgacattggatatgacgaaattttgtttttcccaaatttcatctggtgctaaatacatacccggagtttcttcttgagatctcagctttcctatcatgatgatgaagcaaattaaacatgcatataaatacttgtgtctagccacataaattggtgaaattgcctatatgcaaaaatgtgtaataaaaacaagcaacatcgtcatttcaaccactgagaataaaatcctttaggctcatccctgctatggtgcaatccagggataaagccctgagtcagccttgagacagtctggcctgagaacttgagcccctgttggaaaaaccctgtgcaatgtggtgatgctaagcagctttatggttttgttaatgttcttcaccgggttttatcttactccaccgaggccactgatctttaatcatcgcattagtgtcagctgtcaaacctaagagcattatgaactaggttcttggaaaatgcaatgccatcattaatttgttaaccctctcaaccatcccgtgaagggggttagtaccactctcttttaaaatatgctaacaagagatgttaccctctcaaggtcacacaggatttgtcacaactaacactattcggggtatttccaccctcactctaagttcttgcccaggttcgctcgctaaggggaaagtggaccagctaaacaaagaggcaccagcacaaaaggaaatgccattaaggagcaaaggagctagaggagtttaccaaagagaagcataaacgaataggagaggaatggaatgaggcgaccctaacaaaaatacatgccgactacatctcagaaaagttatctcagaaaacaagagaaaaagaaaaaactctttccatttcacttaaggaaaactgtgtgtgttctcttcctgaatgccaagaggtagaaaattcaggagacttgttttccaaagataaggagcttacgaagtattccacattactgctcacctattttaaaggggttcataagcttgtttgacatatctccttctgaagtacttaaaaatgcagttaatttaaaataattgttggtactaaataaatagcaaatatgctgaaagcatcaaatcaggactatatctgatcttagccagtttcccacaggctcagttcccactgggctgtagaatgttgatgcatgtctgtgcccgtattcaatttgggaagataggagtgtgctgttttcagccagtaagtttatggcaatttattatacagcaatagaaaattaatacagaagcactttgtcttccccatcacattggtattgggctcttcccttcatatcactattttcaaaactctacctacaggtggatgtcatgagcataaataagacaccttcttttattcaaccagttccagtgtcaccattaataattattcaacagatgttgcagctctcttggtaatgtctgttgaacataaccaccatttacattttacattttaatcatggcactataatatttagagagctggtaaaacttaatagagccacacagcgtaagtttacacatgaatttgctcttctacaatctggtaaagcctcaaacatgaatcttttaccaaggcatataacaccaaaagtgcagcacagtcatttcattgttcttatatttttcttgcataaatttcatgtttttaaagatataagtctgacttttttttcatgttctctttcctaggttccagtatatgaactgggaagaaaactccagtgagaagagcagagagtaatttttaaatctattttacataagaatgcaaataagagagtcaataaatggttctatgatgtgaccattatcatcaagggtaaaatcagtcatcaaaagctattacatgaggatggcttgaccacaggtaagtaaaaaaagagctgaatcaatccttgacttagagaaaaaattttccattatcctcttaccatcctctgtaaaagctgtctttgtaggcttaaattttaataaataccttcctggtcactttttaaaatccaagactactgtacatgccagcttccaattaaatgcattcacaattttcttttttaaaacaaattctcatcaataagaattgctaatgatggctggctttgggtgggtataaattagaaaacatagtcaccaccattttgttgttgtttttaaatataaaaataactattttctcttaaaaaaaaaacactgtaaaacaaaaaaagcactgaaaaagtttcagtttggagaccaccactgaaacattctaatgctttccagttttttctatcactattttattacttttataatcagaaggaaaatattttaagtaacattttcatctaagtaaaaactgaaaatttttttatttcagtatgaaataaatactatgaaaatagtattaacatcctatagtgggaaaaggcactggtggccttgctgagctactcatttatctttgggtaatcaagttaatcttcagatgcccgtcaaatgtgaaagtggatgatcttaaatacagagaatcctttccctctactcaagcagtctttgattatgagacatgaaagtttccaaaaattttccataggtcattctggaaagatggctatagcagccatctttccagatattaatttaataccagcctggtattaaaatttctctgaattcccacataaaaataaacaaagcacttacacagtaaagcccaaagcttggagacaaggtgtgccattgaacaacaaaatacaagcaggtaagaacaaaccaacatcatccataagatctgagtggcatcagcttggggagaatcagaggaaaacaaggctgatgtatctgagaactggaaaacccctaaaaaaccaaaaggaattcacaggaaagtaaggatgcccaattggagaatagtagctaaaactaggaggggttttgcctgaccaaagagtcagtgcaaggggcccacaggaagatttgaagaggctaacctaggctagtccctgtgaactttggagactgccctcaggactgccttccaggaagagaaactgctgggagtggaaacaaaattgaacaggatgggaataatagagacaaaggaaagaaaaggtccagataaaagcaggtaaaaggaacagagccagacagtgacagaaagcaggctgccatttttgacaagaaaacaacagaaggctaggttctaaacactttagaaagccattttaaaccctgcctcctgaaagttcaaggaaattatttttcacatgaaaatgaaaaacagaaaaatactgacgtcaaatcccatacaaagttatacaaaacaagggcagaacatccttataaaccataaaagcatgccacaacacagaacaaaaacaaaatcccccaaacaaaaacactccagataatagcctactatttcaaaataaactaaaagacatgagacagaaaagaacgttaggaattagaaaaattcagaagtgagaagagttagaaataaaatgaaaatgcatttcagtaatgatgactacactggaaggcaaaaaagaaaggctaaaaacaacacataataccccaagagaaaaggaaaagaaaaaattaaattaaaaaagatttaaaatatttaagatagtaacagataaagataggcaaagatgatgtaacatacaaatgatagaagtccttgaaaaatcaaagcaaaggaagaaaattaatattaacaagataattaaaaggccaggcacaagggctcatgcctgtaatcccagcactttagaaggccaaggcaagaggatcacttgagctcaggagttcaagatcagcctggacaacatggcgaaaccccatctctacagaaaatacaaaaatttaactggtagtcccagctacttgggaggctgcggtgtgaggaatgcttgagcctgggaagttgaggctgcagtgagtcatgatcgtgccaccgcactccagcttgggtgacagagcaagactctgcctcaagaaaaacaaaaaggtagccattcggaaggaatccctcggtaggcaccttggacttcgtagcttctggaactgtgagaaataagtgttgtttaagccacaaatctatggcatttgttacagcagccagagcagaccaagacagagtatttgctgataaagctgtaatttgttttgtgggaatttctgtactcatgttttatcttaagattaaatatttaaaacaaaaaacaaaagcaaactaaaaacctttccagatcccttacctgtgccttggccaatttcttttccagaaggtcccgttccctctctgtttgctggagacgtttattaagttccactatatctccctttagtgatgccagggctgctgaatggagctgtggtgacagaaaggaggagattagagtattgtagcagagatgtatttccttcccttcattcccgcaactagtataaccaaataaaaagcctatcatccaaaaagcaacacttttgagaatgaaggtaagtgttatgagttttggggacaacaggcataagtcaggtgtgctaccagcaaactgggttatatggtcaccctaaatattatgtgtgggacatgggacctaattttgcatggtataatcaggccagagaacaaaacttctctttccaatggctttccccaagctactcagtgaggatgagcctgacagctgaagtggagctgcctgattctaatcatgagagtcaagaaaatcagaaccatattaattttcaccttcggaaaatatgaaagctgaatagggcaatttggatttctggaatccagtcatctaaattgctgcatatgtgacaggcagacaggcactgagcattaaggggaaaaaagcagcagagctcattttttagatggtctccttgtacagttgacccatttattttcttgttgggtcttccctcctctttgcctccccacttcccccgaaaggctgtactggccagacagatgcttatgtgctagcaggccctctttcaggagcagcaccagaactctgacaaatgacgctgtgaaaagacaaaccaaggatcaactgaggtatctttctgcagccatttctctgggttaactggagttagaaagaatgttcttcaaaagattaacaggaggccccacgtacatccagaatctccatctgttcaacttccaagttctaaagactggactttggctgcacacacacctaccacacatgtgccttctgtgattttcaggccgacggatggaactatttttaagacccgttcaacacactggtcccaaagcaacaccctgaaacgtcctttgaaaccttgaaactttccattccaggtggagctcagaccatcccctcactgaattccatactacatttgggtgaacaactggaattagaacaaaccaacccctggctttataggctttttgtagtctttgccaagaaggatttcaagtaagaagtgagcaaatacatttgatctttaaagatggacacaggacgatggtacgtaactcaactttgaagattctcatttgaggcttagaaaaatgtgcttttctgcaacctgccctccacacacagcatgttggctggcaggcttcagggtgagggtggggtgggtgttgagtgagggagaagcagatataaggcagagtgtggggtttcaaagcagttgtttttgttagactctaatagcagtaaatgtgacttcacttaatcgcatcggagcagcaaaccaacagatcaatagccgatttgaaatcaggaatgcttaaaattaaaaaaagaaaatgtcaggcaatctggcagtatttgtcttctgatgtagggctagggtggcttggaaaaggtcactgtgggtttcagatacaacgttttgtgtgacgacttctcagtacaaataccacagtgttcccgttgtatagtcttgttgagattgttttgtttggtggaaggggaacgaattcactccctttgatggttggttgccccctcagcctttgaactgtcagtctgaggatttttcttcagcatctgacactgtggcatgttacgctattataccaactcttgagaaaggatttgccacctcacctccggcgaaaaggataaaatacgtgagagctgacatgttcttgaagaaattgaggagtggggataaggatcccagctctgttagcctagacttgcttccttcctcattatatctcccctcctacttctgggggaaagggctgcttgaaggggttgggggaggcctggagggaaaagctgagagaatgctgcatgctcccccacagactccatgaactgggccagatggagacacacacagagtacttacttccatcacagacttggaagaggggtccaggatgggtcactatcatgggggagagcaccgggcttagagtgataataccttctggcctaccagctctccagatttccaggaagagctgtcagatgcccaagggggcaggtcccttcacttctctggatggaaggtgcctatgtatgaggtgagaacagattccttgagaatctcatgaatgcaatggacccttctactagggcagagatgagtttgggatgcatgcatattttccacccaattatggtgatgacacactctggaatctatctatgggcccctcaataagaaacatctggacttgatgtcagctctgtgaccccacatcagtttcagagactgtctcatgtgtcatcatcacagatgtctgagtggggaaaagaactttggtactgatgtccccgactccataactgcaggttaggatctggaatccagagactgacttgcttactcaaggtctcacagtcagctgagcaccagggccaaggccacagcactcttttctggctctctggtattgtacatgacagagttttcagtttgttacttggatgaaaattttacttaacatatcttctctgattataaaagtaataaaattgcaacagaaaaataaaccagaaagagcattctcatgttttagtgatgggctttgggtggttttaagctgtttttttgtttgggtactttttgtttaatgagcattttttcctgagttatttctgtattaaagacacaataaaataaagtgactgttttctgcatatgcaggctatagcataaatattgtacagggttattttgcttccttgctgcagtctgtccaccaactcttctgacagaaggaaaacctgtaacaatgaggtagaataaaatatgtctcttactgttactgacaattactccgcagaggctacaactagagagagcagaagttggagtgggggaagccaccaaccagccataagccacactgcctagaattggctgacagaccactccttgacctcctggacggagtaggtgaggagaggagtggacttcccaccacaagtttgagtgctggacactcaatctctgtgcgtttgagttcagtggcactccctgtcccactgcatcatcaactcaagtcatcaaaagctgacataacctcccctcttttggggtttcaccagtctctggcttattggtggcattcctgcaaattcaaaagctagagtgtttgtgagcgatgctacatgaaggaatttgtgtagttgtgtgttggcaagcatgaaaaaattagtttagaggtccctctaggcagttaaaacttttttactgaaatataatatttatacatatttatggggtacatgtgatattttgatgcatgcatacaatgtgtaatgatcaaatcaggatatttaaaataaccatcatcacaaacatttttcatttctttgtgctaggaacatttcaaatctcttctagctattctgaaatatacattattgccagctatagtaaccctactgtgctacagtaggagttatttcttctaactgcatgtttttacccattaaccaacctctctcttcatccctcccccactatcctcacattcttccccacctctggtatctatcattctattctctatctctgtgagatcaacttttttagctcccagtatgagtaagatcatgtgatatttgtctttatgtgcatggcttacttcacttaacataatgacctccagttctgtccacactgctgcaaatgacaggatttcactctttattatggctgaataatattccactgtgcatatgtaccacactctgtatatccattcatctgctgatgcacacttaggtcgattccgtatcttggctattgtaaacagtgctgcgataaacatggggatacaggtgttcctgtaataagccgattttctttgctttgaacaaatacccaagtagtgggattggatcatatggtagttctattttaagggtttttttaggaacctccacactgttttccataatggttgtcctaatttacattcccaccaacagtgtataagagtgcctccgggtgattttttaaaggactaccagtgggtttaaatcttggaaagataaatgtactaaagcaaccaaaattgtcaagtatgtataaatgggaaattatatttatgccaatttttgggatccctttaatcatattctggtttctgaaatggcctctaacttgagagattcagacatatgaactatgaagtatgatgaaaagaaaatgttccatgaaccaaagagaaagaaaatacatgctgtttagagtctgtgctagtgtcttcctcaacacatatttctcttcatactcaggagtcagatgctgatttttagctggtcatatttctgctcagcgaaaatattccagttcccatccttcagtgtagtttgcgctaggtatagccatgtgacaaagttctggccagtgcgatgtaagcagaaatactgtgtgagaggtatgggaaaatctttttgagagggcacatcctttttcctttcatccatccttgctgtttggtatcttatgtgatggatggagctctagcagccatcttgtgctacaaagctgagactctagggagcagaaaggtgcctcagtccctagcaactttgtggagccaccccaccagttttggaccacctaaccccagacttctgttacagaactgcaagaaataaacctctgttatacaaagcgctatgaagttgagagtttctggcaaatgaagctgatctaatcctaattcacagaatcagataaagctgggttcaaatcttatctatgccacttgttggtggactgtctttgcacaatttaatcccttttgttgtagggctgtgtcaagacaaatgatggcatccagaaagtgactagcagggtggctggaaccaggtaagcactcaacaaacgggtttgtttgaagtcaacaaccttctcaggcagaccaagccccatcagaggtgctagggacactcagactaggaaaacagtcctgtcctggagaagcgttatcacctggtagatagcacaggactaagaagccaatagctgcgttgccagattctgctgaaatcctaaggcttaaggagctgacagccagggctcttagttctctgtgaaattttaacatgaggcctaaacgaggttggatagaaccctgacactttgtatacaaatctggatctagtgcatgaaggatatagatccacacattcctcacatttctggagataaaaggccctaattccctaggctgttttgagccctgcttcacattcattttacagtgtgtatccaaacgaaactaaaccacctggacatttggctgcaagctaactgtcaaaatggttatttttggataaaacataacttgagtaaaataatttcactgttcaactgactctaaggacaagccctcttagcctctgagaggaaaggtgtccagcccccctgagcccaggtaagaagtgagcagtgccctcatgacagactctcccaggggtatctcctttgctaagtgaatagatgtctattccgttacatatctgctgtgtgacaaaaggcttcacacttcataaggtgcccttgaactctgcagtccaatgactctgatgagagcccctccaggagtgtcactgcgtatttctggttattaggtgcttctgcattttgctaaccctggcaataaacacagcagacatgcctacactacccagtgcacacaccactctccaggcaccatctcctctgaccttcatcacgccaggactctgtggcctaagggcaagctatgcttcccgatttgctgagggacaactatttttcccatgaaacacagttggtaaaaaggaatacgatttgaataaaatggtggagaacctagattcatctttgtgggacttcagtctgtgctttgaacagcacagtcttcaaagggcccaaaggcacctgcagccacaggtgaggcagaggaatgagttcatccccacaggccctatctagatacatgcacctcatgctgctgaggcacctcatggtgctgagggctgggccagtcttcccggctttgttgggaagtgagttcatctggggtaaactgtgcttgttctctttctccttaacttggtctggctacttgaagtgctagtttaacactcactgccagcgtgcatctattgccttcccactgagtaatgacaggagttacagtggtctcccccttaatggagggaggtctgctccaacacctgcagtggacgcctgaaacctcagttggtactgaactctatatacactgttttttcctatacatacaaagctatgataaagtttaattcatagtcagagattcaaaataattaatagaacagaccaattattaacaatatgccagcactgctactcttatgcttcgggccattatgatgtaaaataaggatgacgtgaacacaagcactgtgatgccatggcatttgatgtgataacccagctggctaatgggtggggagcacagacagtgcagatatgctggacaaaggaaggagcccttccccaggtcggacaaagcagcccagcacgcaaatgcatcagcctactcaaaacagcttgcaatttcaaacctgccaattgtttatttttggaattttccacttaacattttcagactgcagttgactgcaagtaaatgacactatgggtaaggggggactactgtactattctgtctttctagctgagccacttgctttccagatacaaagtatgcacaatttttgcttatgttttagtgatgacaatgggtagtgccaacttctctcatccagtgacaatgggtagtgccaacttctctcattaaaggacacttaatttcactgaacttaatttcattgaatacatatttttggcaggttccgcactgcatgcttcatacactttacctgttccatcagctgcagaggaaaggcagtgtcaaatcccaatgccaaaatctgcgaatattcttgagaattccaggtcaccaggcagtaataatgaaagtaataatattaatagttaccgtttgctgaatatttattggtatcaggggcttgggctaggcacattacatgccatatcttatttaaccatcaccacaatgctgtgagatatatgttattacctccttctggcaaacgaggaaaccaaggcacagaagaggggtagaaaatcagccgaagtgaagaaaactaataaatattaggttggtgcaaaagtaattgcaatggcaaaaactgcaattactttttccaacctaacagtaccggagataataacacacaaggaccctatgctcaaatcttctccactatgtgcatcactggcacctccaactcaacataccacggctctcccttgcccgagggatgcgtaaacctgcttgtgtccatgtatgtgtgtgtggaggggtggatgtggggcgggggtgaggtgtgtgcacaggcagggctgaagacatgggagaagcagggtcagggttttcgtgatggcagcacccatgtgattttgggtgggagcgagaagggtggcagggcaagtcctccaatgctgtgatgaagcgtggggctcagcttggtataaatgtgggtgattctctttgtcctttctgtgcttttttgtcctctgtagaagggtttgtatcggattacctctaagattcttctggttttaaacttgtaacatgcttgcctggcatgttcacctgtccaggcacctgagttctgcactatgggctttgcatactttatttgtccactggtcccagaaaaatctgctgaagctcaaatatttaaggaagcttcactctatacagaactgttcacccaagatcttttccctaaaaatggaatgagttttcagaatcacacatcgtcttaccactggcaagggaatttgagaacatctagtccaattccttcattgtagagaaatgaaactgagactcagagaggttcaaggttcatcaaattcagatttcctggttccctgtccagaggctacctctctcccaatggcaatccaagagctcgtgggtagtcaataaaatatgtatgtcccagctatccttggagacagcaagaaacatctgcacatgaaaaagcctcattcagcttcccatccaagactccacacccaggtgttctaattcagatacatacagaacaaaatgcctggcaaaagggtagtgttccctgctagatggataccatcaggcctgttcagtgacttctaggactggaacattcctctttactaccggaattccagctaggggcacctgctatgtagtatttcaagaaatgctgctcatagtcttgaaagttaaaactcattaaatataatctaaattataaattaaagatgtctcactgcatggaaatcacttttgtgtgccctagatcaactcagaaagcagcagcttttcatctttccttttacctgataatttcattgagaggtcagtggcccctgaattatttcttaaacctcagctgaaattcagttgctcaaaacagcattcaaaggctccttcaacaccgcagcagtgggacaccatttatacaagaaagattaaccctacccaaggatggctgatatagggaacagtgccagatcacaaagcaggcccaggtactcactgtgaaagctgtcatactggtccctaggacccacttaaagccacacctccccttcttcaaataaatggttaggaaatggctcccaagggggagaggtgtctgagactgacaatcagctttaaagatgacccacaatcccatcccatctgtaaacatatgctcccctgaaaatatgtcccatcgtaatttttactggctaacacaactgcttgctatgtgctagattgctatactcagcatataacatgcatttttctcaactattcttcacatagctttatgagatgggtagtgctgttatctccaatttaaagaggtaggaattgagacttagaggttaagtaacttgtcaagctagtaagtaacagagccagaatgaaagcccaggtctgtctaaccccagggtcttgttcataactaccaagtcccctgctttgcaacagaatatcatagcacttctgagatccttgcaaatacccacgaaactgttgagaagaaagatctcagagggttattctgttaagagaagaaagcagaattagcacaattagcatgggggatagacaggtattcattctttaaaactttaaacattttgagaaatagaagaccattcagctggtatcagacccaggaaggaatccgtgaaaaattaatctccagctattcctacattctatgtgggaaagttaaagaggacaaaattgtagtataggtaaaacaagcccttacaaacacctaactttgctgcttaaagactacagaaaaggaaaggttattaccttcaactgatgtgatctttaaaaattaaaaatctaaacagaagaatattttatatattttgtaaaaatttcctatacaaatattgtaagacaatagtagctattaaaaataagttattattttccactaaaaaatcctaacttgtagtaatatttattttcaagggaaacgaaaattatgtggttatacaagggtttttggaaagaaacacagacaaaataaagacactgcactaagctggctgcaccaacttaaatttcaagggggctgcatcctaatgacacatcatggaggagatgaagatgtaacaattaaatccagctaatcaggggacatgaatatttcagtgcacgctaaatactgatgtgattccccaggcggaaactcccacagagaattctatgaacatgaataaaagggttctctgacaaggtctgaattgttcataaatttttatattgatccaatttagcaggtattgaattccccattctagagaaaccaagtacctttagtggtgaaacagtcaataaactccacagatcaggaaaggccaaagtatttttacagcaatggttgaagtgctttgaagagaccctagattttaatggattaaggacaatactttttgtttgggaaagcaaatggaggtttagatttatgtgtgtgtgtgtgtgtgtgtgtgtgtgtgtgtgtgtgtgtgtgtgtgtgtctacacatacccatacacacagacatgcaattaccaacatatacacatacagagtatatataaaactcaaggcacatgcttccagacttctaattaaagtgtaagagttatccaagatgtcagctatttagatattcaatacaatcatttttaaatgcattcccatcttttaaaagatactttaatatgcattatttcatttaaagaaaatcagttttaaaatgcttgatgccacggcatgctccgtttcagggaaggcccaggcaggccctggcttgtcttgcctcaccacagggctgctgacggatgggccatttaccgtttgctggtacatctaatccaaagcaccaggagaggaggagacacatttcaaatctgcttcgtgttccctctctgatggggccctgctgactgcttcagagaacagtgtgtttagatagaaagaaggaatggcttttaggtctgaatcttctttcctttccaatcactctaacccagccaacaatagtcccaactcggatcactttgttcccagaaaatgaagagaatgggaaagagattaggtagaaagaaaacaacatgaaaaaacagtttcatggttaaggacataggctttgtcaaaatgcaaaaacaaaataccctggacttgagtattagttcagctttgggtaactcgtttaacttttctaagcctcagtctactcatctttaaaatgggaacaacacccactcattctagttgagaagattagatgaaatatttcaggcaaatcacttaaccacaacatcagctggcagactgttagccacaagggtcgttgcaatcttcttttttttttccctgagacatggtctcactctgtcacccaggttagaatgcagtggcaagaacacaactcactgcagcctcgaaatcccaggctcaagtcatcttcccacctcagcctctccagtggttgggaccacagtcaggcaccaccacgtccaactaattttgttgttgttgttgtagagatggggtatcaccatgttgcccaggctggtctcaaactcctgggctcaagtgattctcccaccttagcctctcaaagtgctgggattacaagctagagccactgtgccttggtccactgccaccttactgaccacaattatcatatgccaccccttctgcctgctaaaaagtgtcaaaataaaatcaggctttgaaaacagtggtacgttactatcctatctcattttcacaagtcctgattaagcaatcagaatgattcaacacattggagcctagatcacattaatcagagtaatctagagtctgcctttcaacacgtgtaattgaatcagctgctccctgcacccaggctgggccagcaggtaagcaggcaaacacattcatcctaaacagcctggaaactggagtagcctcatgcccgctttgcaccctctgcctcatgggtcctcatatcattcaggtaagagacagtcaagaaccaagcgggacatacataatgaccccaaaatcaatttccataaaaacgcatctcaatagtacaaaagagaggaccaaggaagttattgtaagcaaggacacacacaaaggtcatctattcatgatagaaaaataatcaaaaataataagtttttgaataaattgtgtggcaggaatagaataatcctaagttgtcaccaaaacagagaaatatataattaacttagcaatcattatttcccacatgtatgactcatttcctaagttctttcatgttggtttccaattgtcccccacagatcacctattctcccccatccactttctctttcctccttttttcctgtaacccttagtatgacctgacatcatatcctaacatttttttttgttgactcactgcccccataaaattatgagttccaagaaggcagggatgtcaagaggctggggaaatagctcatgaacaagaagaactgtacctggcacatggtagaatttcacgcagtatttgttgaacgggtaaagttagcaaattagaaaatacagataaaggaacattatccttacctcttcccaccaccactatgagatgatatcacctgcaaatatctgtcagacatttctgtaagtgtaactacacttaagatagtttatgcaaaacaatttttaatatagtattatttttagccaaaatatctaactagaaagaagtccaaaaatacatgtaccaaaatgttaacaacatccccaggtaatctctgtgtagtgtgattacagatgattttctttctcaggtttattgtattttttctataataaacatatattagtattatacaatttttaagtgttttcttgaccctatttacaaagtcttatgaagaatacaaataaataggtaatccttgctctcaacaagctcccagtgtattcagagagataaaccaaggattttccaaatctaggagttggaaagatcattaactgtcctcttatccaacagtccagccagtgccagaatcctgtctacagtgctgcctgcaggtggtcactatgtctatgtgctaaaaagctcggcaactcctcagacagccaagcctgctcactgttggatagctactggcatttgcaaattttaccttacatagcaactctgaaattgcctccttgcaacttgtcccattggtctagttccacaagtaggataaaattagctctcttttatactccaaactctccaagtaactcactctatcagtaagatccttcctaaatcatcaaacctccagaacaatccttgatcgcccaggggcccctaggatgtcaatgttccttttggtaaatggtagccaggaccaagcacagtactccagatgaattctgcctagctcattcttacgtgtcgatcactttacaagagttttcatagaattctcacagtaaaccgagataggtgctacaatgaactcatttcacagataaggaaactgaggcacagtcagttttctagtacttgaaaccacaaacttccaagctgacctgtcacatttaccacgggtatccagggtcacacattttgagatcccatatctggtgtgggctaagggagagagcctgaggactcaagactgcagacttggatggtgctcagcaccagatggtttatagcagtgctgctcaaattggaaaggccattggtaccagagggagtttcagtgggatccccatgcttgctctgacagtgcctggcaccagaggtaagaagctcccctgtataggtaaagggcagc[450 bp omitted]gccagttctcttacaaactgacttattccttttttgtccccttaatttcatgggctaattctgaaattaataaagtatggcaggggtagtggcattactcgctgcagatgggatagctaaggacaatgcaaggtctcctacatcggcactcacctctacccttctgccgttacagggactctgtgacacccttgaaagagaaagcagcaggaagaataaagaggaggccaccatgatgggctgataaaagaaacgtttccttggggtttacgtttattggttgtttctgactttctctaaatggcaggagcacccgacccaatggcaccgtcttccaacctgtaaccacccaaaaaatccatattaggttccagacctaatggtaatagaaacagcttcattgctgagggaggtggggagcttttgggtaatcacaaatagcacacagcttcccagaagtaagacttctttcatcatatatttttgggaatgacacggctttctgcccccaaaacatacattcatttgcaagctaaatttctcctgtgcttattaagaggggtgggagggggcagggaatgaaggctgcatattttcccaagctcatgaagcccagcctaatcattacttcaaacatgccacagcaaaagaagtgacatctaatcctgattttcttgtcatgtctaccattcccccatctccttgtagacatagcactaggatgcaaacagaaaaattccctaaagctgccttattttgtttcctgaaagcagaaaggcagtgagcaaagaaactatgaaagactcctaggctgtttaggaatgatacatttccaacctagataaaaatatcaaaagaaaatctaagtctggcagtgactagaaatactgacatttttacaatacaaaaactaaaatttacccaaactcttaaagttaagccccactactaaagaagtttacactgaccatcattaggcatgggaccaagtacagcggtagaaaaaatgttgagtaagcttttgcctgatatccagatggagtgtcctaagagtcctgcatgagctaccctgtgaggtcaacattctgaaatgctaatcttggaacagcgtgggtgataatacagtttaaatgcaaacatcactctgagatggataaacaggactataagatccgaagactctgagtcttcgtaatagagtttaaatgcaaacatcacttgagatggataaacaggactataagatcccaagactctgtgagtcttcccattaccctcaatacagggcatcatttatttaaaaaaaaaaaaaaaaacaaccaaaaaaccaaaaaaacaaagcttagttttgggctctcagaaaaatatcacaaatttgaaatgggatgattttgctcagaggtaaggagaacagaggcaaattagcactagctgccaagcatatgatgaactcttagactgcagggactcaccagggtatgcagcaagagataatgggtttacatttcagcatgagggattcaggcttgctctaaatgtctttcctgacagtgaagcttggtatgtcttacaaggtacagcgatggctgtggaattactctcccggaaaacctttccagtcggggcgagtctcatctctctgggataatgtgggtgcagccctgcctgggagtttggtcggcagcctctcaagattcattccagtctgatgattctctcactttacaccaatagatgcgctgtggcaaaaaaggtgagtcaacacacacagaacaattatggagggcatttcttttcatgtggcaaagaaaaacagtggttattccaaaggaagcacaggaacctcaaagctagctttttgttttattttcttaaatcctggcaattgtgactcataacacagagcaacatttacagaagtgtgaaatttgcgcacttcattccctgatgtgcttcagcctgggagctatggcatttacacacctgcagggctgagggctacccggaaaagtgacttaaatagaactggaaatttatttaaagtgattgatacataaaggaacagcttcctcatccccaaaataacaggctagagtgaaaaagggaaagagaatcaccactttaaattttaacttcaacagactgaaactctctagacttttaaaacaatttttttctggggcagagaaacatgacctacaaccaccaccttcccctttcaataaccatttttattttatttttgagacagggtctctctgtcacccacgctggagtgcagtggcatcatcaaggctcactgcagccttgaccttataggctcaagcaattctctcacctcagcttcccaagtagcagggactacaggtgtgtgccaccatgcccgactaatttttaaatttttgcagagttaaggtcttgttatgttgcccagactggtcctgaactcctaggcttaagcaatcctcctaccacagcctctcaaagtgctgggattacaggtgtgacccactgcacccagtcaataccatccttaaaagaaaccaaaattattcaaaaattgcctgcagtctcaggattttaaacattaacaattgaacctatctcatttcagatatcacatttttgggaggcaacagttgtatgtccgtgaagaaaaagtgcaaacatggcaaatcatttcctagggaaacacacaggctttgagtatccttataaagcaacaaagttatgctggattttcttatatacctagtgcgatactaaaccaagggcatgccacaacaagcctatttggagctttatatacactgtacatgcttgtggaaacaaggcaactagagagccataaagaattcataacttacatatggaatattaaaattttgatgaaaatgtgcccttttccagataaatgccagatgttaagagtactttcatatccattcagacaagtgctttaacatgattcagttctttgaaactttctgaagaaatatacttgcacttctttcccccattacatttatggagaaagattttcacatactttttattaaaaacttgactaagaaaagatgagctgtgctacataagttaaatgatttccatagaaatacattattagagtatacaaaaggataaatctatgccatgaaagaataatacaaagcaggctctttctatggtgagttcaaattccagaatataccacaggcacaaaacccttgtggtttacagaattctgaatctcgtagtttgaataatgggtgcaggccaaagcaactgtgcttttttgccatgtctgtttttttaattaagccctcctagtgggtggtgttggggggaaaacaggggcaacagatctgagacaggcagcagagaacggggcaggggcaacagactagtccacaaggctaattctatattacccctaaagtctataaagcacaaagactctaaattcaggcttgactagtagcaagcaatagcttaggcaggcatcagcccccatgatatccaccaactctcttgcaggcatccaacagacataatcggtggatgtaaagattgtgttagctaagcaaacggctttaagacaagccctctgtgcctccccatcaccaatccccagccccagagcaccctgaatgcctcccttaaagaaatcttgaaactcccaccgtcccagactccctgccctctgtcctaggaagacagaaagaagggacactgatttgcattgctcttgctgttttataggtaagatgggaggagaaaaaggggaaaagaatccaaagagtagggggaagagggaaatagaatggataggctgtatacatggagataaccattaattctaaaggaagccaagaaacccagaaggagaaaggaaaataataataagcaaattaacattataggtctttttaaaagtctttttgaaagactttcctctgcaggaccattcctgcacccaaatgtgtcaaagccttaatcttgcatagtctcctgtaatgccaccccacaccctataaccagcatggaccagcaaggccaagcacaccaaggaatgctgatgtttagataattgggtggagatgaggtgtgcactgagaaacaagtaaaggttgttcttgaaaaaatgttctctcattaagacccagtcaaactgctcaggtgtggtgccaagggggttaatgtacaaattcagaagctctatatggggtcacattctggccatggggagacacaagggtaggtttcttaaaatgcattgacttgacctcttccccaagagcagtcaccttttgaactgctgtgggatgacctgggaaaaaaacagaaagctctgcaatcaggcactctgtgtgagtgtttgtagtcaacaatcagagggctgtctagaaaacaaaatgcctcatttctttaatagtagctattcaggcagcaagaggcaatttaaagactggccagcaaagtgcactgtttgggagatcggcataaatgataacatttctattctactccagcttttatgcattgctcaacttcacattgcttaaataaagtacttccttctggggatggcaagtacatgatacctcagctacagctactatggtagaattagatggatataccccacacatctaagctccaatacaaaattcttagggatttttagtaagatgcacaaatgagtatttttaagcacaaagtcatgggcaggtctggtcttcatagaaagaagcttgaccattgatggtagtgtcttaatctaaatttcttttttcttctttacagcacctacttcttttaaacaaggacagatggagccatagggtgctaactggtccctttactcctttcacttttttgtccttttcttcaatggactttacttctaatccatggcagaatcatcctctccttgtagaattgggcaatataccatattcctacctccttaggcaagaagggacatttccaaaattttctgataaaccacaactgcatgaatggtgagaagcttggatgctttttatttctgtggcgtcattaaagtcccacagtacccagcctttgctatgcacacccacccatgtccctatctgcttgtgggaagctaatatttactctacccacttcctagggataccggggtctcggggcattcctataagtgttgtttgttaaaagcactacaaaaatgttacagttcaaggtagtatttactgacttttatatataactctccttactggtgttcttaaaattcatctctaacatactttattatgtttgcctctgtttacaaaatttgacaagaagttatagacttttcgtgatgtggtcagtagttacagtataagcaagcaactcatatgttttgctcccagaaaagagcccttgggaatacttatctctaagggcaagacttgaaatctgagagtcagatccaaatattgccagatggctggcaatacctttaagctgaagagtgggtgtttggctcccacactgggcgttctgcatccagaactgagactctgtggaagcaccgagtacatgcgtccctaaagctttggcttcagtggctctcctgaaccatttctgtttgtcaaaggcatgtgaccatgtcctggcagttcactcagatatctgccctccacacaaaaatttgatcacaactgcctacatccacaagaaagctcctgagtcaagtttagcagagtgctatcacagcatggtgcaagataatttcccatcagacaggcagccattctcttgaacctaaagacaaaaggaggaagcatagaaaatagagctgtttcatcacttgggtacttatgagtttacatctctgccccaaaatgtattaagcttcagtcgggcaattacctaacaagggcaaaaatgcacagagacaagcagaaggcggaaacctcttattttttaatttttgagacagagtgtcactctgttgcctaggctagagtgtagtgccacgactcggctaactgcgaactctgtctcctgggttcaagctattctggtgcctcagcctcctgagtagctaggactacaggcatgcactattacacctggctcatttttgtatttttaatagagacagggtttcaccatgttgcccaggctggtcttgaactcctggcctcaagtgatcagcccatcttggccttctgaaatgctgagattaggggcatgagccaccgcgcctggccctggaaagtggaaacctctttaacccagaacatctaattggtggctctgtggcctgtatcatttcacaggtggttaccgggcagcctccaagaacggaagcagctgtggcaagggaattctccagaatctgtgaggtttctagctacgaagagcttcagtgatatctgcttgtcaccagcaagtcctggaactcatcagtaactgaccctactacatgagcccctacataaggaaggctctcccttctcaccctcatgatccatctcccatggttcttagcaaaccatcagtgccatgttttgaccaagaaaaagtaaaatggaaagctatccaaatgttgactgacttcaggtactatgggagcactgagggggaaaagaactgttatgtaggggaaggattctatatgagaacaggtaggacccttttctccaaatgtagcagtggaagagaaaagagacacataccaatggacagttcatacccaatagacacagttcagctcacacaatccaggcacctgacttaatattgatcaagtctcactggatcacttaagacaggattcagaggtgacagcaatgtttttgtctgtctgaacacaaaacaactcaaaaaagggtctcaggcatcaaactctcacctctttaaggttatttaacagcctaggcaaaattttggaggttagaacaactattcagctgctttagcacttcatttgcatagagaacaagcttcattttcccttctcactgtacttggtcagcctcaagttgctatttcctatagctttacagctgaaaactctactctgccatgcacatcctcttcttttaagtaacctcgtttgactaaaaaggctttggggaggcaaatgtgaaatgttctttccccacctcttacacactttgacataacacagaacaaatcaggtgacgagaaagactccacccatggccatctgtccatcttaacacaattacctatgtgctgggcgtaccataacttagccaacagccaattatagaatgtgtaaccaattttccttgttgtatattgctacaatgaagaaccttagaacaaattcgtggaaatagagttaattatctggccaaggcttctgactgtgaaattgccttctaccgaaagctattgcaatatatatttctcccagctgtatctatttcactttactcctaacatgtgtagatatatcacatattttttttttgccaatttgattccaaaatagtcttcattttcttgattatttcaggataaactttttgtcgtaaatctactggacacatgaatttgttttttaattgcctgtttatgttctttgcctgttttgataggatgattttttagagtttgatgtatataacagatattaacttttcaccagatacactgcaaatactctttcccagtgaactgttcgtcttttaatttatatagcattttatcacatctgtatgtttcatatttttatgtagcttccataaaccttttccttaacagatcctctctctgatttttgtttagaaagacatcctccaccccactcagattccatagctaccaacattttcttcagtgtggttttcttttatgtggtcattttttaaaccttttattcatctggaatttcatggcatacatgaattagaaatcaactttgtacttttcatttattgtttgtcctattactactgaataattatagctacatctttatgttactctaaatgacaatattatgtttaatgttgcatagtgtaatatctccccctttgttttattaaaaataatattttagctatttgtttattcttcctgataaatataaggtcactgtaaagatttgttttgaaatcccatgaggctctggatcacaacaccactaaacttctattctcccccaatcagtgtaatcatgtgcatgactgaatcccatctaataacatgagcactccatttatcaaattgtatttttctttgcagaggctctctttaacctagacataaattccttgaggacaaactttatttctgttttctcagtatattctattcctagtagctagtacagtgtactagaatgaatgaaatcaaagtgacctagaacatttgtctttaacatcttatttagtatttcaaaccccaattagctaaaacagcaccataaccctgaatgcacttggtgtgtgtaactcagcaaaggtctaagtgcagggatttacagcccaccacaccactctaacagcataaccaattccaaagacagagacctttctacattactgcaacagcaacacaaaggggaaatgaacatggagggtaacactgggtagattaagatgaaccaaaatcaacagaactggaactcatgcttgagaactacagaaatgtgtctagaatgaggtatatcactgccatggtgaagtaaagaagtcagaacactgctttaaaaagtcctagacccaatgctaagagagatttaggacattgagatagcaaagatccaaggtaggggtgggtagacacagaaatatcctaggtaaaaaagacctgaatcaatgttcccaacctgtcttcttcctggctccttggtaaagggactcagctaacaaaaaccaattcactggtggaggctggatggagtcattgtgaatcgtacctacactgctggtatggatcacctgcactgtttggcacctaaggagcacctcttttgatctaatgatttactagttttaagatatatttacaaagatatttattatagcagtataataacaaaaactaaacgaacacattaatgcccatctacaggagagtaaataaatacactgacatatccatactttgcagctgtaaaaaagaatggtatattgaagaccttggagaaaaaacccacgacatatagttaaaaaatattttttttcttaagactttttttttttttgagggtgtttctctgtcatccaggttagagtccaatggtccaatcacagctcactgcagcttcaaactcccaggctcaagcaatactaactcaacctcccaagcaagcatctgggactacaggtgtgagttttgtagtttttgtagagatgagggtctccctatgttgtccaggctggtctcaaactcctgggctcagacgatcctcctgccttgtcctcccaaagtgctgggattacaggagtgagccaatatgcccagatgacagattttttttttaaatgttaagaagagaattaacatagtgtgatctcatttttatgagaaaatgttcaccacatttataaatacttgtgtattttatatgagcttagatgggtattgaagaataaacaccaaattgttaatgctggttaaggaggaagacagaaatttaagaggagaaggggcctgagttagctcttccgtgatatacttctgtgttgtttgacttgttctggtggccatgtgtagcttttgtgctttgaaaggagaggctaataagttactattcttgaaaataaatagacatgtcaataaattttgaaaaatggatattaacaatgcaaatgtaaaagtatctcagatgtagaacaaacaaaataatgaaccccattagaacatacttgagatggtcaaactttgatgacttaaagctggaaagaggtactacaattagttttcctttgatttcagggacgtatttattctgcttatcttaagacagaacagaccaaatggttttgaaaggtcctagatggttctcaacatttgggtatattccaggaagactaagttaatttagctattcacagagtggcacatttgacagggaaaatgcaaatttgatcactgtagttagtgttcaattagccactcaaactggacggggagtagtgacagataaatagatatgatgctagggatactgcaatgtatttcacttttgaaagccttgtttgactttctcaggaacctatctaggaggtcgtatgaaatttgtattagattgtaaatattgttttggtgtacccccaggggattaaatagcaaccacataatattccttataatctactctaaaatacattcaattttaaggaagagatatagtcatccccaatcatccctagagtacttttcatgaatatttttcaacatgtgggtcatgatccataaatgagtctggagacaaatttagtgtgttgtgatcagcatagatctagattaaaaaaaaaaagtttgaaaactactgccttaaatattcccttcttttctgcatcctaccccctatgtactgtaccaaccagcagggaaaaaacactttctctcaagtctggataggcatatcctaggctgattttcaaggagctgattttgtcattaagaaaaatgttaagtttaagtatacatttgaaaattcaggagctaattctattttctctacttcccagcaaggcatttgttataatgggtaaatggctttgccttaggatttcttgctgagaaatagctcctaaatgcccatttcttgtactgtatattaaaacatgacataagaacaagggggatcacaacaataaggtcataaagctgcaatcaggccaggcccctaaggactgtattaacagcccagcactagcagtggatgtacagagaggagctgtgtgcaccctgagtacaacagctagtaaacgtttaattgaaaagttatctcttgcagctgtgctgccaacactcagacatctgaagacaactgtcaacagaattctcaggaaaagacatctactattgaagctctagcatgttcctcaacacacagagcaagacactgttctcaaagtccaacagctaagggtgacggctcccttgtgctccaggcttgtaccaccagctgctgaccacactgctgcacccagaggatgacacttgatgtggcccaaactcaacttcccttctttccctgcaaactaacccaccccgtacatccagcttgctaggcaattgaactgtcacccagttcaattaaatgaacaaatatgggccatgagccaagttctacaggcccatttacccaaaccagagacttgggtatcctttttgaattcttcctccacgtccctcttatcgatttctgttgatcttgcctcacaaatctttctggaaaccatccactcctccccatgccagcatcaccattctagctcagggtccactgcttgtctagattgcaggaacagtgtcttcactggttccctacatctagccttctctctaaactgttctccaaaggaagcgtagacactctgaggtgcatgtctgatgacatcatttctcttgctaaaagagaaatataaacaataacaactcttcagtggctgcccttcgccctcaggtaggtccaaattcttttaaatggacctacctgctcccacccccacaccatcttcaggtggcctctggaaagacttcttgagtcctagtggacccctctcctatgtagcctcctagttcccataaagcttctaacacactctttcggtggccttgtttctttggtctcctctagtagtctgtaaactccttgaggactagcattttgtctgactggtttccaacagctagcactgtgcctggcacaaaggaggcactgaataaccacatgttaaagactaacattgactagttcctctaacatgggaactatgataaaagctaaaccaggcgttggaggtcattgtgtgccttgtgcaatgacacaatgtggactttcagcaatggttaggaaaccatcccaacaaatctctcaggtacataaccatggaaaatctagggctagacagtccaatgacttcagtcacacaatctgaaaacaaaaaggagcactgaaatcaatgatataagtctgcttatgatgataaacaatgttaacattaagtacattttgccattaaagccatttcacataaagacattataccaaaaaacaaaattgttatagcaattagatttcttcatgatcctttccattttttaaaatccatgtttgcatttttctttaaaaagctgtaatcctaacatacatatatggcgaattttgtgttattttctataggttttctcaagtgggtacacagtcttcatatttgtagttttaatgcctgagtaaatgccatcaagttaatgtatcatacttaatcatatttaggtagtttctaatctttactaatttaaaataatgctgtaacaaacataaaatgatttccttcttttcgaattacgaaagaattttttctccttatcttagaagactatttcactatgttaaacctgcaagaacacatacttggaacaccatctgcaaaacaatacccaaaacagtgggtaatgtaagaatggaccaaaacagggcttgcaaatcagaacacatgcaggaaagtggggtatgagtggcagcggaagggaagagaagctgcagaaatggtatttagaatgcgttcctgaatgacacgggaggagcatttctggagtcactcttgtcacttagacagttaacaaagacactacctgcagcagtccctgttatggaaccagataaggcagtggcgagtggaccatctcagtagctctgagcatgcagcagctttcctagcaaggtggctaggggtcagatttagacataaagtgtagatggcattagtgcagcaaaggattctggcctgtttccagtagttgaggtactagaaaacaagagaaagagcaaacaagggtagatgggggattgccagggcagaagatttatttatgagggatatattgggaagggttagccagagaaataatagaatcccaacccactctgcctatgacaagtggccactcaaccacatttcctcctcacccccaagtctggcccttgcagagatagctaaacttctgccaacaaccggattcctttctataattaaatttaattcagcactcatgtaaatattatttctcacactactgtcttctatcactgttgcgttaacctcaacaattttaccattccacttccactgtcaaagaataataaaatcctcaaaaatacccactcttaattaacatgttctattttcttttcctcctatcctaccctcctgccttctaccagaaggcaaaggggatctaaagtcttcctgcaaacacagagctgtggtctcttgtgattacagtcccatttctatctctctcatttatcttatcaaaaaaaatcttataatatttacacatactctaagaagccaggtaactgttaagacttaaattcagcagagcttaaacaaaagaagagcaaaaatgatccagaagtcataatttactgttaaaatgctactatctcatgtaccatcccccataccacactcttccatgtctcattcaataccttacagagaccctttaagaacacaggctgtgctttcaggaataactgacatccctgtaaatccatgtaatgttcagaatataaagccagtgctctctgctgtccatatagcaccattaatcttatgaacagtaccacagaacaccctcccccagccccctccatctgctttaagtagggcaagtgttttactcatgttaatggttctgacagatgaggatcaacactgctttaatccatttgcagcctagcacagggaacatttgtcttctcaaatgctgttaggggcaagtacactggctgttagtaacaggagaagtacttcaggcagtgctcagtactctgaagtgactggctctgctttcctcatagagggaatgcaaaggaaattcttcccaaaatgggttcaagatgttctggctgccattgtggttgtgtgttgatcctttaaaaacagcagatagtagaattttattaaactaagacacactgaatcaatttctattgatttcttttaaaatgccagtgtatcttctcatttaccaattaataacatgcaagttctagaaaagacaaaaatgaatgcagttgaatttttcaaaaggattttgctgtaaaatgcaacagcccaattaggaaccacacacattttgcaatgatatacctagcaccaatttataacacacacagggaacattagagccaaggcctgccgtgtttacaagagcatgggccttagatacaggcacacacctgtgtccaaatttcagcttcaccatcttttgtcttctcaaccagctgctatgggtattgcaggaatccctggtcaagagacatacatacctaaacatatacatacctacatcttggttctgaattacctgaagatgtagcttcagacgatgtgctaaatatgccctagagatttctattctcaccccagaagtacaaagaggatttccatggagaatgaatacagtggcccgacagcctcctcccccgattttaggaaggggtcgcctgcctggtctccatgagaagtacttctttatcagcatctggacttcacgggcccatctctactacttatcgtcacgtgtttttttatttgccatgttctcatttctactccctttgttttattgctatttcttcttcaattccaccctgtctcccgtgcttccaatttataataataatcttatacatttcaagacttcagtacagtgcttccagctcagaaatctaatgaagaaaaacaaatatggcatgactcagatttatggaatatattgtatagagaacccaccagaaaaacccacttgttaccccttataggcaggattactgatttcttccttctgcccctcctaggctttcaatgctgttcagggtgcctcgatgagatgagaatagatggacaggagactattcttctagtttgggggctctttcttcttcaacttctgggtaaaagcatggcccaagattgaccacttaacaaaaatgcttactgacatgagagaagtttatgttataatgccagccattttctggtaagccatttttgcccaagaagagtatacatttatgtatatgttagatctcagcagtataaaagagatcaatttttcctctatacaacagagaatattaaaacattaatggcatgtctatctggatgtgggatttaaggtaatttttattttaatatttttctgactttctacattttatataatagttaacaattacattttaatcagaaaaacaaaataattacgtaaagttacttacgtccttctaactccattcagcaccctactttgaaagtcatcatttatgtctttacagtttaatctaaaatcatccaaaagtcaactctaattttgaagaatcaaaagattccaacctcccaacttgattaaattagatcaatgttgcaatgccctaaaaacctatattcttatattgagaccaacacatctctatgtgaacgatgacacttattaaagataacctagtctaaactcccagaaacaggcaatttagactattcctaaacatgaattttgatgggaagctttgattttcaaaaaggagttttcctcattctgctgcttacagaaagcctggatgtgcacaggcctctttaagaccattatcaggcaaattttagaccaccactatcggtcagaacaccattaccagccttgaaatgtactgattagaatttagaaaaggattctgaagagattcacttttactgggactcaaagaaatttggctaggctgttttattgtttataatcatagaggtaaatatttaggaaaatagaagacaacatgttatgaactccaaagagttatctaaatgagtaggatccaacaaaagtaccttgccatctataactgtagaatactatacaaaggagagataatgcacaataatcttagctaccttctgactgtgcacctgctgtcagaaaagtggggtcaaatctgactctgcttctctgggtttgttttctcagctacaggatgaggtaactagtccccagagaggaataagcgagatgtgtaagaacaaatgaaaatataacaaaaggcaaacctcaaaccaaaatgaagatcatctgcctggagagttcccttcttcacatataaaactcacaattacaaaaccaaaaatagaaaaaaagaaagaaaacaagctctcagacactgtgctgaagtatgagtgagtctccttacctgtgactgcagctcactgtaaattctgaggcccaggggggttttaacagttgccacgcagatatgttgctctccaaggaccccattccctatcaggtgcattatctgctcatcagcatcacttgttccttcccacagctgagccaggccctgatgtgctaacatggaggagaggtgtcatgctccctctgtcagctcggtgggtttagctggaagcatcctgtgtgtaaggtaaagccacaactctcttcttcaccagagttgttccttacctgtcaattttgtttctatttaagggtgatttcacccccaccaatgaaatgcttttaagggggtttttatagtagagaagggactgaactgcatttacacacattatacagattctcttcattcagttagtatttaccggatggcctctgcagcttggtatctgttcttccatcactacagtcaagccagacccagtgttctaatgtggttaagtgggcacataccctttttcctcagaccacactaacaagatggtaagtgactcactcaaaacacacatattgggtatctactatgcaccaggcattctgttaggtatgggagtaaaagattaagatattctcctaacttcaaaaggcaagactttcaggaggctgaggtaggagaatagcttgaacctgggaggcggaggttgcactgagccaatatcgtaccactgcactctagcctgacaacagagccatcctctatctcaaagaaaaaaaaaagagcaagccttcaaaagctacatgaagatactcacagggaaatattaatgcacttgatacttcctttcacatacaacatatgtcacagtgagttttgcatttacatgccagtcttcatacctgttggtgaacttctatatttatctacttccggtgcctcgcacaaggcctggcacacaggggcactcaatgcatgcgcatccaatgaggaactgacaatccagatggcgggaaggtataaacacccaatagccacgctgtcacaggaggcttgtgacgaggccatagtgaaggtctcagtaatgtgccacagacagcacaggagagttcagtgcagttcccatttgagataattcaggaagattttcttggagagaaggcatttgagctaagtttgggagaaggatttcaacagggaggaagaatgagagctggggagggtgtccaggtgggcagagcaccttaaatggaaacatgataggatttataccaggtccgtggctgccagatgatacgcctcacgcagtgggggctccagatctctcagcggccccatctgctcctcagtgtaattgatttaaaaggtcagctcccttatactcctaagacaagagctctgattcacaccagagaggtctggaaaatctaagctgtgtgtgcgtgtgtgtttgtgtgtggaggggaaggagacagagaaatgtcttttaataagcttctctaaattttagctttttcaatatgtgcaacttaattcaaatctatcttttcttccttcaggtaccaggtcagagaaaatttgtcagactcctcttaaaaacattctttcttgtctcagaagaaaggagtgtggattggtattatggcctctaatggaaacatggtgacaaagtcagctacctccctcccccaaacatccccctcccaagggttttggttccaaataagcctggaaggggacattcattggctgcatcaaattacaatcccccctcagctgcattaattggaatactgtatctagcacacagcaggatgagagtctcatacgcagagagagttgggcatctggagaagtgtgcagacccaaacagcccatctcaagagcaccaggggcaaatgggaccagtccagagggatgggaactagctggaaaacatgactagcaggggcaaatggtcagaattctctaggttctgtctgaagcaagacttgtggggagaaagggggccaaaggaatagagggctgacacccattagccctttccacatgactgctgctctcctccctcctctgcccgcccccacccatcttcacaattccccatgcaatttttcggttgtgcaaactgaagcccaaagagcttagaggatccaaaatcacaatgctggtaagtaaaatgaaatgtctgatgccaaaatcaatttttattcccctctaaagctcattaggggagacagctggcatttaatttttaaagtgatctcaaaagaactgtaatctcttaacattagaatttgctcttataagattgttttcccacttattagcaccatgcatttgttgagacggatttggataatatcgatattctgacagaacataatgggataactcaggtccttaacccaaagctctgtttctatttaagatagtctaaaagagctacatcagcatctgattctttgccacctaccctccctgaaactcaactggttttccatatgctaagcataacttattttttctggtttggatgggttagaaagatgctggaagaaaaattagaccaacttgtaaaactttactttgctgatctatggaatagcacacttttcccacatagcaatttagtttctttcttcgttttttgttttttttttttttttttggagacagagtcttgttctggtgctcagtgctgagatcatggctcactgcagtctcctgggatcaagcaatcctcctgcctcagcctctcaaagtgctaggattataggtgtgcacaaccacgcccagcttatagcagtttggtttctataaccctataggaacagaggtcaacaaggattatttttattaaaaatatcaaaagaagagatggacaggtataagtaaagtggttaagtctgaaactgtagaacatagaacttctgggtaaaatccttagagtccactgatggaggtatgttagaaggctaacagcttcaacttcgcatctccaattctataattaccaactgaaatagatgggcaaaccaccttaactttgtataaagtactcatgacacacactgtgcagtgggagaagtaaagaaaatgttagcctgagagtaactttgtatttgtctacaaacccaaatcttatctcctccaccttttaactgaaagggtcaagagagaaaaggctgcaaaggcaccagggaagctggggaaatcctgaaggataatgaacaaccacaccacgttaggccactccacgtggagacagcctctgcacgatggttcaaacatcaacttaatgaagagagagtgggcataaggggttgaattcatccaactttggatcctgactatctaagctgtctctaacatgaggtcccaattctctagtaatcagaggggttgagagggtgaggaaggagagttgtaaatgggagtggacttactttatgcagtcaaatcttaacaagacacaagccctagaggaaacaactctatggacctgaaaactgcaaacacacacacacacaccatacaaattgttctgaccagcaaagaaggcatgaacacttgacttcctaacaagggtccacaggcagagaccatctatcttgtttgaaattcttaaaatcctggttacatgattctaaaattcctggacacatgatgtcccaaccaacaggagattagaagtagcagattgaaaggctagagaaagctacacagatatcagcaagaactgacagctgacaaaaaggtaagaaagagaatcattattctcaaaagtgagcatattttaaaactcagcagtctaggagcattgagaggaactaacagctttacaaacttcaacctctcttgagtcattgccatccccaggcatgtgaaaaataattacaagtgtaggaaagaaatacagcatagtagcataacatattaaagagatttaggaattctagttcacactaaattcattgagaatgaagcgtgctgtagcatgacactctgcaatcttagggtatagtaacagaggccatataaggaaatgaatgaggaggtcacccctccttcagtaagttgaattctggattccttaatttgagaagaaagagcaattaagtgtatattcagatgagagccaccaagaccctgaggagatctgaaaacaaggactgtatgatttttttttaagtgcaatgacagtggcattgaggggcaacaatgcataaacctagtttgtgggactgactgagagctgctgctgaggcagcatagaggtccctgggatttccggggtattaacatgcctgtgcggcaatggatccttgcaactactacaggtgatctgaccatatctacacagtatccctggctcagtctttcagccctgcttctcacacagggaaatccagagcgtgggtggcaggggacgtgccagcaggaacttgaaaacacagtaagtgcagctccaggggctatagacacattttgtttgatttgcagtctcccttacaccccctcatttgggcctgttttaaatatgaatgggtttgatataaaaatgtgtttctgaatttcccaaggcccgcagcagccatggcgacaatgaactagaaatgcggtcagcctccctgtttggctactgccttccaaaattaacaccacttatttttcaacaaaaacaaatcaaacctcctagtctacttcatctatttaacctgccctgcctggcacttgagtgtgtaaagcctgccctacagcagcacttgatgtaaatgcaacttaaaatatttttatatttaagatcaacacatatattagagaataaagcaaaacacatactagagaaaacatctacctattagccctgggatgtcgaaaaagcttcaagcctatgtaccttttcaagggtcaccatgggcactttgcttactgaggggtagaagtttcctatcttgctttatttcagagcagtggttctcaaccacatgcaagtttgttcccaaaggacatttgggaacaatgtctgcagacatttctggttttcacaaccgggggaggatagggggagctactagcatctactgggtagagcccagggatactgctaaacatcctacaataaacaggacagcccccacaacaataattatctggcagaaatcctactttagcagaaatcctactttaggaaagttttcaggaagtgctggcctataagatacaggatactttgaggctcctcaacatctgccccaaccaaaccattccaaactcatttaaactttcacctcctatagtttatcctccactcctcatatgccccatcactactagcagtttttttcaactttcacctcccaggttcaagcaagttcaagcaattcttgtgccccagcctcctgagcagttgggattacaagcatgcgccaccatgcccagctcatttttgcatttttcgtagagatcgggttttgccatgttggccaggctcattttgaattcttggcctcaagcaatccgcctgcctcggcttcccaaagtgctgggattacaagtgtgagccacagcacccggcctcctctgtttccttttaagaagatgaggctaaaagcactgtcaactcactgggttgttctgaggatcagaggaacccaggatatttcagggcttagtcaagagttttccatgttctggggctcccaaacttaccctagaaaagaaagctgtaataaaacatactgtgaaaccccgtctctactaaaaatacaaaaaattagccgggcgtggtggtgggtgcctgtagtcccagctacttgggaggctgaggcgagagaatggcgtgaacccaggaggcggagcttgcagtgagcccagatcgcgccactgcactccggcctgggcgactgagtgagactccaactcaaaaaaaaaaaaaaaaagaaagaaagaaaacataccaacaaaagcaaacacatgcacctgtgaccaaaatagaacatcaaagactctctcacatcacaaatgtgagccatactttagacagaacccacgttacaaacaaggtcccttacagttctagtgcatgctcagaacaaattgaggggcaaagacctaacaagaggggcatcaacaaatctggtatgtggccctgctcaagcatgatcctgttatcattctagaaaggggaaagcagaagtaaaccaagccataaatgagcctctctcactcccggggtttttgaaaaggggatgtaaaagaggccatgtattatttacagccgaggaagcaaggacctcagatggtactgaaacaacgaatatagcctatatcaatgccagcttgtccacattacatgcaagccttgtggttgtctctggatgccccattgtctattacaaattcatcacaaccatgattggatactgtcaagcttcacaaaaagacaagagccagctgtcaaactaaattcttctcattgtttaccaaaaggaggcaaaaaagattctaattattctagccccacgaaacaggtaaataagaaacacagagtcacatgttctgccatagaacaactcacagttagaatttattctgcttccaaggacagccacagtgactgcaggggtatggctgcaaagttcatattatttaataagcaaattggatcaagaggctgaaggctttatgttttcatatttattaagtaaagatgtattcaaaacacaaaagcagaaaggggaagggaaaatcatggttgagggcacacatgcttttcagaggagtatggtataaagagaccagcccacatctaacctgaatgtcacctgtgatgtagtatgcacacatcaccctgtttaatcatgatgtaggcctttaaagtagatgctgttgattcttctcatcttacaagtgtgatataactgagtctcagaggaagaataatgtgcccagggccacacagctggtcagtggcagagccaggaattgaggtgtctacctgactccacagtttttaatttagataaactctaagcttatctaactacaaaaacagagcaaagagtattaggaagccagtattagctaacataaatgagaaatggatactaagcaagagaaagtaaatgtgagaaggggaacccttgttactctgtgagacacagctgaccttggtgcagcaagttttctgaatgcaaagcccagagacagcttcaccttggaggagtgaggccgtctaccaagccctgtgaaaaggagcacctgaacagaaccgagacaacctcagacttgcttcaagcccgtgttcacaaaataatccaatgggtgcactgagcccagtgacagcggctgccctcaccttgccctacatgtcctctttggaagagctggcatcttatatcacaactcgacagtcagctgccccttaaacagtgagactctcagttatggctctgggggaaggacttactacagaccatctccatagtttcataggtcagaagaaagcacctttgaagtgttagcccaattttacagttaaacagaagagaatgctgcttgaaggatcagatgatcaaagcagagattgaccatgctggtctgcaaaagtatgccctttaggtgtaagcccattttacaggtagcaaaactgagtccgagaatttaactggataggccatccaggttcactatgacttgcttaaaagcagtgttggactcaggtgactctaagcctcacagtctatcactaggttgcactatcttacccctttatagtcacacgatacagaataaataaaagtgaatcaactgagcggatcaaaataaaaacagaagtaaatcacttgagcaagcaggaggctggctccaagtgctcagagtctagtggaatcactgtttaacctttgaaaaaggaagtaggttaaatttaaggacatggatggatactaccaaacttaaattaaataggcaagttcactcacttttaattagccacaatcttaattaagcagccacctataaaaagcccagtaaccaccattaccagtgaagctatataacattcctgcaggagaagatccaggcttggctcttggatgtaggttatctagagagcctcattagtccactgagatcccactggctaatggaccactcaggggcctgtgtccgcctgaagtacccagcctcagtctcagcctagccacctgcagcccaacacccctcaacctacagtcttctgttagcatctgattaggtgttaaggtgtctataaggtccccttatttcctgcctgggcagctgctataacagtcttggccaaactgcagttgtaaagtgaactaagtccatagctaataggtcaggtgataagatgtgagagaactagctgtcttttgcttgtgttcacagcctgctctaaactggtagggctctaacaagccacttgatctatttccccaaggaactaaaaggtctaccggaaaggatgataacaacaaataggggtggcaggcaatcgcgcttccctagatccaggctctctggcctacatagcaaaggcaaaatcacatgcggaaggaggggctataaggattctccaagtgttaggaagctttaaatgatgcacaccaaaggaggagcttaaaataccaaggagaaagtctccagattaaaacaaagaaaagccctaattctaagggggaaaacttgttcctgaatcacagctaaagaatgtagagctattcagtattagtgtcccttctgctgaaaaaaccaaacagacaaaacaactacaaaacttagaatggggtggggtgaagagcaggagctagcacaacaatacagagatatccgaatggtttcagaatctgagcatgtcgagctgcaaaaaggtggtgccaggagaacccagggcaggggcaagaggaagtgtatgaaacatcctctgagtggattcccttactgggtgtggggaacaagggattgtctaaatctaagaggcagagaaaaataaatgtctctcaagtttaccatctcttgaacacagccccattaccatgtgcatggccatctgcaggaccaaggcaagtactctgaagtgggcaaggaagatggagtggagggcagagcatggtgcctggcacgaagcaggcatgaccctgatagctggatctcagcagcaggctggaagggcccatcctctctggattatatagatgacttaaaatgaacagaaatcatcaaatccaaaaacgataatcacctccttttagcattctccattacattcaagttctcaagcatcaccgagcagaaggtaggaggctgcttacctgcctttgctcctggtctcttcccatccaatgttagaagtgggaaaggctggtctcccccatctgcctccgcaccagtactccacatttttctgacccttcttcttcttcttgggtttgtgagcctgggctttccttctgtcattctcttcttctatctcttcataggaataagaggaggtcccctcactttttaacatctctccttctggccacagcctaaccaggaacatcgttggtcattgtggggaaactggccctggaggcccatcctaggcatggccctaccgaatccagagggcaggcacctagaagccttcctgctgggccatgttcctttagacaggtggaagccctcagctgagcaaaggggagaaacaggagtgcaagggaactgaagatgataatcatggggctctctgacctcacagtgatgcaggcagaggtttcctcgccacatctccgtacatcagagaacagaaggaagccaggtcatggggctgaggatgggcgacttgatttttaagacagcaggatgcaacagtttcttttttctaggacagttaaaatgacgcaattgattatagaacagcgatgagaaagagcagcccccagtgggccaccactccccatgaaggccaaaggctttaacaccttgatttaggtgtagtgtcaagttgttgtttttctctcttctatgggacaatgttggactttaactgattcaacagaaaattctcaagaatgtctgcatgtgctaagtactgtacaagccctggataagttaggttaccaccatgcacacctacctgctggatgcctagatttctttatgacgtatgcaagacagattcagtcatttgtcaaatatgaccattttttgttttccccccactacagaactagaagatgatgtttatgtcactttttgagcttagatctcattccagtgtgctggggctagtgccacatgccccttccttcaccatggcacccacccaccaggctctaaggaagcacccacacctgagagtaaccaaagacaatacctgaaatgttttggtaaggccaagctattagatcaaggtcaccctttgaaaacacctttgagatgtgcagtctagaaggctttcccttcagaaaagaacattctctggacaaccttgttgtcaacgttgataaactgtgaaacacaaggcactgttctttcactaagaaattttccctcttctcaacatgggattacatattgtctgtaggaaatttgtgagttaaaaaagcatatgcagaaaatagcacctataccccctacctttttataattagcatatgtcttcgtgtgtacttgtatatgtggattaaagacacacatgcatgggctttggatcgggtgtgccagaaagaatcctagctctgaaactaacagtgtgatgtgcaatttaacaagcttcacagttcgcttattattaaaatgggagttacacctccttttccataagtttgtaaggactaagagatgatacatgcaaagcacacaacacagtccaaacaaggaagaacctgctaagcctccttatacctccttctccataggtttatcaactaagagatgacacatgcaaagcatacaacacagttcaaacaaggaagaacctactaagtagtagatgtcagtatgaaagtttttccattaggccttgggattgttttctatggctgctgtaacaaatacatgaacttagtggcttaaaccaacacatgtttattgtctacagctctggaagtcagaagtctaaaaccatttcgttaggcctaaatcaaggtgttatcagggccaggcttccccggaaggctctggggtagaatttatttcctcagctcttcctattctagcttctggtagctgccagcattccttggctcgtggccccttcatattcaaggccagcagcacagaatcttccagtctctctcagactctgactctttgcttccgttatgacatctttttcttctgactctcattttcctccctccctcttatgaagacccttttgattacactgggcctacctggataatacaggataacagcctcatctcaagattcttaatcgcatatgcaaagatccttttaccatgtaaggtaaaatattcagtaattctggggattaggacatggacctcttggggtgggggtgggcaggcattcaacccaacagatgttcttattatattaagctatttgagaatggtaacatggggttgttggaaatattttctcctgtttgtctacattctttccataaaagtaacatgtttgttgtcaaatcctcttatctacacttttgtcatttctcccactaacgttaagcctaggaattctctccgtatcttgtcaggatagtgtttgtgtatgcgtgggtgtgggtgtatgtacttcactcattgttacaaattcaaacgatagagaaatacataaagtaggaataaaatttgttccccacctccaattctgtttctcctaggaaaccgcttcatagcctgggatccactcatccagagtttatgctattcattcacacactgcacttccatttgtttatggggtcaatttgtacacctaagtctatagtccagctgggatttactttagtgaatgctacatatacacctaggaattcctcctctcatttgttttttttctaaggaatgattaactgaagcacaatttgggtaatagttgttatttttctatgaaagtgtattttgtgacctattcctgtttttgtccagtaccacacctggggatcatctacctgccagttctacctcatgtttacaggtaccactattcacatggtggcagctgcacaaactgaagaaacagcacttgggaaaaattacgcaggctccagaggactcctatagatctaagcttataaagtaacataaacatcatcgtctagtcctgtgattggcggaaaacaaaaaatggtcatatctgacaaattactgaatctgtcttggatatgtcataaagaaatccaggcatccagcagggggacatggtgataacctaacttatccagggcttgtacaatacttagtacatgcaaaacactcttgagaaacgtctgttgaatcagttaaagtccaacattgccccatagaagagagaaaaacaacaacttgacactactcaaaaggcctcctggtctgcgtgggggctcactccctgaataccgacaatttaggaggcccaggcaggaggactgccttaagtcaggagttcaatatcagcctgggcaacaaagtaagaatctgtctgtacaaaaaaataaaaactaaccgagcatgcatgtgtgtagtcccagctactcggaaagctgatgcaagaggatcacttgagcccaagagttggaggctgcagcgaaccaagattacatcactgcacttcatcctgggcgacaaaggaagaccctgcctcaaaaaagaaaagaagaaagaggaagaaaaagaagaaaggggaagggaaagggaaaggggaagagaagaggcctcctgattccctatgatgagtgatgaatgctgctccgtagaaagattttggcaatcttgaattccttcatctatatatagtcattcctcgaggactcattgtgaaaatgaatctagatgtagtgtacaaagcaaacgcaataaaccaaggccaaaatagccataaaatcaaaaagagaacatggcccccacagcaggcctcacttctgttgtcagtgacaacatcacagccaggctggtggttccactgttgggagcagtgatgtttaactctgaatagaaccaggctgccccagaagcatccatgcccatttcagatagtgattgtgccctaggctttcccagtgcacagtgtggactaaatataccaaagcgtttgttgaagggaacagtaaaggaagccagctccaagaccacacacagatcacacttggtgtgaagacagcaatggacctcgtgagggggtcgatcaatatccatgctgcaacagcagcattctcaacagtgtgtgctcggaaggggtgaccagtgttccttaatggcacccagcatcgggaatgtagaacctctaccagcacatacaggcagaaagcaaattataacaaccaggacacagtgagtttcactaatagaattagacctacaatttggtctcaaccagatacaaactgtctgcttaggtctggtgtaatttacaacagcctcaaacatgtttctcatctcttcgtatgacaggcaggttaaactttctcagtgtcgccactcccctttaatgcatttccaattgcatgtgaaatttatcacccatctgtgggctctgggcctcctgagatcaccaggactctgcaaactgacacagccatgggcctgagaaagaaaggtaatcttaagcacccttagaagaaatgggctggaagaaaaagccagatggagggtgcagaggacatcctggcaaacaggtcagtaagccatctctggctctgggatgtttgctaacagttgaagatattttcacttctcaaactcctttgaccacaatattccccttctcaaaaatctttggtggcagtgcccttctgcctgtgttccaaataccaccatctggctttcagggtctctcatctggcgcctcctctctctcagctccctctactcttctacatgtgggtcatggtggtcaagtcacagctggcttcttttgcatctgtcaccccctcagggagaaggatgttttctcttccaactactgaaatcctaccatccttaaagagctagtgccaaatgacctcatgcatgaaaccccacaggcagctcaggcagcagtagacttcattcttttcgattgtttacttgtgcctcggttggcacatagtgtctttcactggagtcatgctgggagtcacttctattggtgatatacctatgggtgagataccgtaagtaatgggaaatatcttcattcccatctcccttgcttgtgccaacacctagtgctgggttttagaagcattgctggatggatgaatgaccctctttcctgacatcaggctctcatgacctgggtcacagtcaggtgcccaggaggttagcaggtgagccctgatggaagtgggtgaagtgagcaagagggagcagtagggcccatagcaacctggagaggtcatgtctcatttactaccaggcatctgcttctcaactccagcatttgttgctaggtgggaatatgggccccatgttgctagatactatgattttgtaagaaaatccagaaatagggatttttaagtgaaatattttgatgtataagggctacttaccaatgttaatttaaaaaatactcggtcgggcgcagtggctcacgcctataatcccagcactttgggaggccaaggtgggagataatgaggtcaggagatcgagaccatcctggctaacacggtgaaaccccatctctattaaaaatacaaaaaattagccgagcgtggtggcacatgcctgtaatcccagctactcaggaggctgaggcaggagaatcgcttgaactggggaggcagaggtttcagtgagccaagatcactccagcttgggtgacagaacaagactctatctcaaaaatcaatcaatcaatctgtgggcaaacagaagcacgtctgcaggttctggctgagtttgggccctgtgatctggaacctccactaatggtctttggaacaattaattaagggtgccatcctacatgtaacattgaaataaaagatgcagtgtctgccctcatggagcttaaaacctggttctggaaatgtaagatgtatacatggaaatctgagcaagaaacggtggcatatgttgatattgtggaattaggacttcagactttttggagccagggagctgtggtgggctggggggtccgctccactgtcacgggcttctttcttaaatacgttctgggtcgatggggagatgttggtcaaaggagatataattacaattcaaaagggggaatttttttttcctaaaccagttttcagacccccaatttttttttaagcccaaataggcaaacaaagagagaggagataggtgactgcttgggctaggggagaggataggtaggtagcggggaaagaagtgaagaatggctacctatggttatggggtttcttttttaggcagtgaaaaggctgtttgtggtgatggacacacaactctgaacacactaaaaaccactggattgtacatttgaagagggtgaattgtatgatatgtgaattatatctcaaagctgttgaaatcataaagtaaaataagctccctagcacacaggaagcctgatgacagccaatctctttaattttcacctcccactatttcttgggtcgtgggaggccaaaacaacaactactgatggcatcaaatattgaaaacttactatgtagggggccctatgtattaagcactttattccattcaaacctcacagcaaccccacatgggtgaattactatcctcactttatagttgagaagaaaaggaggcagggcataagtaatctgctcaaggtcacaggggaactgtgaagccaggacttgagcccaaggtggccaactccagagcctgtgctctgtgcaccaggctatgctgcgttccgtaaacccaggcaggagaggcggaggaaagcacagaggtgacactcgtgtcatgtgactacaagagtgaaagtgtgtctgataagcatctcagtccagctaagtgcaagctatggaatggtgcagattagaaagggggtaagaactggtggccagccacgctgtgagcctatataattcagttaacaggaaagctggtgcactgcaggccttctttgtcatactatgtataagtctagcataaagcaagtctcgtgccacatacagaaatggtatcacccatataaggcagttcagcttgttcatgtctttggtggtgtcattatttgagattaaagggttttggtatcttctttctgagctacttgatagcaggggctgtcatttgagtccttcttcccctaccacctcagcacctaacacctagcaggtgttcaagtattttaaagtaaatgagcctgggataacttatgtatttcaagagagaaggcaggaactaaataatatctaaccttttagaaatgtacagatgtggggccaggcatggtggcacacacctgtaatcccagcactttgggaggttgaggcaggagaatggctggagcccaggagttcgagacaagcctgggtaacatagtgagactctgtccctacaaataattaaaaaaaaaaaaaaaatagccgggcatgatggcctgcacctgtggtcccagctactcggcaggttgaggcaggaggatctcttgagcctgggaggttgaggctgtagagagcagtgatcatgggccactgcactccagcctgggtgacacagcaacacccccacctcaaaaaaaaaaaaaaaagaattaacagacagtatagatgtaacaaaactacctctgaggaacacaacaaacagctggcacaagattcaggagagaggctgggctgggttgggaggcgggaccacgtaggctgaggtgcatgcagtgaccttcaagtttctgagttgggggtgggctcacaagggttggatgttatatagaaatgaaatcaataggccaggggcagtggctcaagtctgtaatctcagcactttgggaggccgaggtgggcggatcacctgggtaaaaccccatgtctactaaaaatacaaaaattagccaggcatggtggtgtgcacctgtagtcccagctactctggaggctgaggcaggagaattgcttgaacctgggaggtggaggttgcagtgagccaagattgcaccactgcactccatccagcctaggtgacagagcgagactccgtctccaaagaaaaaaaaagaaagaaatgaaatcaatagaagagcatcctgcaaggacaggtgttaagtgtgaaccaaggaccatgactaatctagtgccgtgttatctgaggtccgagtgtaaataatatataaaaccacaagacacacagaacaggagtaaggccctctttgtgggaccaataatagaaaccacatgtagtaagctaaattgccaaatctaaaaacaatgtgggtagtttatataaggggtcctgaacctggagtccacttactttgaatagacaagatgtgctaatccctgaaactggacacaaaattgtatgagtgtattttttctgggaggaaagtttgctgcttccagattctcaaaaggattatctaaaaagagttaaaattagggttggagagtgaaagaatctgaagcagcagcattgcagcagacactgtgtgccatgggccatagaataaagtctcaggatgctctggtagaatggtgaatggggtgaaggcagttggattgcatcaccacgtgaatgagatcattattccccaatgactgccagcttgctgaagtaaatgaggccaaggagagagaacaatgcaacagaccaccaaggctaataccatcctctcctctccatgcctgactttcacaggaatgagtgacaccactccaaacatcctgaactttctgaagacaaccctgaaacccaagggggatatttttctggcttcttcccggtgaaggctattgattttgaaagataaaagtggccaagcaacacatatgggtatctgaaacagaatttttatttttaggaaccgtgtgtgagacactagaatgatggctcctagctggggagaaagggcatttcatgagcacaggtggaaagagttttgccatggatgaagtgacaaggtaagttttaatgtggaatttggaaagtggaggaagacacgtaaaatttatatcctagctacagtggaagacagtaaatatgacaggttaccacagaaggaagggatttcaaacctaataggaaaaaataaaagggagctggaatctcattataaatgcatggtctgtgagtagtaaacatcatgaatttgaaattataaaggaaaagtgatctcatgcaaatatagcaacaggcaggtacagtttgttcaatgaaagccattcagatggagggctcaggacagcagctctgtgggtcaagatgacttgacagtgaaccacgagttgctgtgaggatacatcactgcctgcctgctgatccccttcctgttagaaagcacaagactatacaagaaacagtggtggtaggggttccttctaacaccaagactatctggttcaacttaaaaaaacattctcccatattgaacttccctgttccacttagttaggctagacctcaggtctgcacagcagactgagctgacacaggaagccccttctccactgagaaacatatggaaatgtcggatacaacttaagttaaaaagcaaacaaagaaaagcctagccaaccttataagcaaaaggatctatccccagaaataaagagaaatttcaaagagcaaatagggggatttgaaaccagatggtgcccaggtggctacctaggtgaggccagcagtgaggcctgaagacacctcatcttgcaggaaactggtgctgtgccagaagcaaggaagggatttcgttaggcaaaaaatctttcaatgcatttggcttttcttgaacactaacttgaccatgtagtagataaagggttaacattctgccataggtgatctgcaggttatttggagtatgatggatggagaccaaacagttaaattcttatatggaaccccttacacagggggaaaaagcctcggatgtatccatctatatgcttggaactggaaataagaaactactggcctggctgggcacaggggctcaggcctgcaatcccagcactttgggaggccgagatgggaggatcacctgaggtcgggaatttgggaccagtctgaccaacacggagaaaccccatctctactaaaaatacaaaattagctaggtgtggtggcacgtgcctgtaaatcccagctactcgggaggctgaagcaggagaattgcttgaacccaggaggcagaggttgcagtgagctgagattacgccattgcactccagcctgggcgacaagagcaaaacgccatctccaaaaaaaaaaaaaaaaaacaaagaagaaactactggcccacagcagtgtggtatcccaccctccataaatctagggccccaagtcagatgaagtcctaatccatggctccttcttggtgactttaaaaacccaagaaccaactagcttttgcttttctccccagctataggttttgcttaacatatttcttgcatttcagagtcaatgcttttgacatcctcattttccaaacttttatgaaaacttgaaagaaatattaaaaatatgctctagattttatgtcaagccttgatttttaggtgctcctataacttcaaagtaatttaattatgcaggaaggttggtttagtaaaggttcattaatgcccaagacaacatgcctttctccttaaaggggaaaagtcttattctgctagagggctagattaaaatcaagcaagtttttacacttaagctaattgagaccaggggagccaggaatgaagtggtttcctgtcccgccatccaagtaacacgctgtcaggcaggctacactcactccagccaataaaggggcaacggcagcaaggaacgaccccacaaccccattttcatcgctcctctttccctcccagtttttactggctgccagcacaacccagtcaacagcaagctttcctttaccacacaggctttcctccttccctgaacctgctcaaccccagcctccattacaaatttccccattaaccgaagccaccaaaatctgctgtctgccttccttgccttagacacttctgaatgaattgtgattaactgattcaatgttcagttttgcaaaagggggaaaaaaaaaaaggaaggatggggaagaagctcaaaacaaataaagcaatcccggggttgtgctggagtgcacacggagcttctataggaaatgactttttactagtcccttaaaaaacttgcttaggccaagcagccactctttatctagatttgccaaaatctgttctccaggactgataacctacactggggtagctccgacactgggtttactttgaaagattttctccagttaccgccagctgcctatctgtttcgacaatacgtacatagttagcctacaggatcatcactgtcattcttttggacatgttcatttattagcagtcattcagatacgccgacagtgtatttgcaggggacacaaaaacacacacgcttatacacacatggtatgttagatgtttaagactgggaaaaaacttaagtcaaacaacacataattagcctctgcttgcagagatgagacagtttatcagactttatgacttctgttcccattccccagctcccccatataccttctactttcccctcagccccaatgcagatgaaagtttgccctttatttaaaaaaaaaaaaaaaaactttttctaggggtatagaagcttcagacttttgaactttatggcgtccgtgttagaagagtgacttgacatattctcaaccctgtttttcatcaacaatgcctgctcactgccaagtttagatgtgactttaaattgcacccaatccggcaaaataatatttcactgctggctaccagtaaagcgcatacaattttccctttcagaacttctgagccaccaagccaggaaatcttttggtgaccactccccttcccatttgtagagagaagccaatactcaggaccaggggctggacttggggaatacaagggttcctgcatttcagccagggctccctcttgccccaccgggaaactacccaggggcctgaacctgcaagaggtagacaggcactgtgagctgggccagttgccccgcttgtgctcctaccttgacatgtgctctggtcctccttgcccaagaggtgtggggatgggtgtggtggaggcacagtccggggttggtctcgcctgccgcacgcctgttcagtagccttttaatgaactcagtgactcagcgctgtccctcccccaccggcctcggatctcattcctctcaatcgcactgatgcccatgtgacagcacgttgtctccaccgagactaatcccttatcaataagagctttcagcacggcccagaccagattactctgtctcacaaccactttgctgacctgcccggggggccaccgaatactccccgagcgcatactatttacagaagagtcaagataagccggatcacttggcgtgattatttcgcttccaaagtttgtggctttaacaaagcaaacccacattcaaccactcaaccaggcgccgtgcaagccaccagaatgaaaaaaaacaacgctggatcttacacacatgcagtaatcaaaatattacaaataaaggctacatgtgaaatgataggttaagatgcgctctagacaccagatgtatggagtttgctattagatttctttgccatagatccagcgcaaggcaacatggcatttcattgtcagattaatgtggacataataatttataagaaggctttaaaaaaagtcaccaagattggtccttaactttgcccattcagattcttaagagcaaaccaaatttgaggagagatgccggacgccaaactgagtacaggctcaatatcccctattttccgtccttccttttccggcaatttttatcccactcatctctatccacagcctttctgggcagctgagatgaataagaggaatgagtataaagcctacaaacacggtcaaggagatgactgggagtaactacatctgtgcctagagaatggtcttgacggtttgcaagaaccgtttcatcagcattatgggcaagaacaagaaggccaaggcatacttaaaatcatcacaaagcctctttctagcactaaatgtgaagtaatgaagccatcacacagcagatgaaggcctttgcacacaaagctctcttcctcagaaaagctctattgattgatcttgaaatacagatttttagttctaaaactgtgtggatagctagttaaaattcactctctttccctccgaaatgcattaaaattctaaaacatgcaccaaattctaaaaattaagaattctaaaattctaaaatatacaccaaataaaatttatttttagtattaaaatacctgatgctcatttcatcaagtctctgttctctcgtctctgttcaacgcagttaggcagatctgagggtgctgcggagagtatctgaggagaaatgccaggcagagagcgagcaggccctgagctgcagagacaatgctccaggcagaaaaccatggctggcaggaaaccaggagaaattgtgcaagcgaagagccattccaaagctgttctctgtcccacggttatgatcacaggggagggtaattgcatctacttctgatcatattaccttttgccatttgtcagatagcagacctcaaattcaaggtggattagtctggaaaactaaacaatcagttttgaagtcttacttttatatccatccactgatcaatgcaaatatgaatagtacagaaaacagtcaaacacctaatgaaaagtggaaccctgcagtaactcccccgtattcaacagatgacagggctaatgcagggagtttggggctatggactggttttatagccaaagccacagataattccatcaccaaagactgcttcctacttttggtgaaggaagcaggtaatttacatgccagtctcagttttttcctcctttctctctccctcaccccctgccttactggtatttttctctatgagttcccttgatgtattttgtgttggaggacccagcctgcagctttcacaggaagggctgatgcagtgagaagagcaggatctaagaatcagaggaggtgggtttgagatctagaataaacagttaaaggcctagaggcaaggagcttcacttttgagccttaatttcctcagctttaatgagaacactacctgccctgcttgcttactaaacaggactgacctggtggtcaggtatggaatgtgggcttgtatcatagagaaggtggacaaaacaggatggagaaaacaaagtctgagcccctgctctgccatgtcccttgtggggcttcccttcctcttctaggctgcatttgtaaaatctgctctgtgtatctaccagggtcaacaggaaacttaagcaatgcatttgaagataaatattacaaaactgacgatgctatcagagggcatgttcttaccagtctgtccaaagactatgttttaaaagcatgaatagctctaaagttgaaagaaagtcttaaagagtatttttatattacactatagaaaaatatcttatttgctttaaataacgggaatctaagtttcaagtcagcagattagaggtgagcgggtagcgaaaccatgaggggtggcatgggtagatagagcattctcccaagtaagatgactgaagccagagctgatggggctaacaatgacgttcagtcaacgcagtgcatagaccagctttggaggccagggcatttctatagaaggctcctgaagccatgccacagagatgggtcctttcctgttgcttcactgcctagcccctttgtgagcatggtgagaagcctgaaggtggcagcaagcactgtgtgctggcatctgcagtgagcagtgacagctacaccactggacaactcaatcctgcaggactgctccaagactgaagttcagaatgacaggtcactacggcttgcagtcattgactcccaacacctcattttacatacaggaaaactgaggcctggcagcaaggtggaggcactttcccaagaaaggcagcatccaagctttactgagtgccctggtcctcggatgccccacccagtgtatactcactaccttgggatgtttccccctaactggaatcctattgttcacccatttgctcatatgtgtaatatataccatagaaccttaaaaattatctttgacaattttctcctcttggctttataaaaatctgtcctttccttatgcaaattattttccaaatatttaaatttttcgggccgggcccagtagctcacgcctataatcccagcactttgggaggctgaggcaggcctcccacttgaggccagaagttcaagaccagcctgggcaacataacaaaaccctatctctactaaaaaaattagccaggcatggtggttcatgcctgtaatcccagctacttgggatgctgaggcacaagaatcccttgaacctgggaggcagagattgcagtgagctaagattgcaccactgcattccagcctgtgcgacagagcgagactgtctcaaaaaaataaataaaaataaaattttcaggcactttgaggaaccctagtcttgaatcatcttgtacttaaaaagtaagtaaattaggtaatttattttgtgaatccttcgtaatatttgtataaccccttacagttttcgtaagctttccctcatttgatcatgacaatagctctgtgatgtaagcaagacaggggtcattacccttaattttggtggtattacagagcgatgaaatgattcatctagcaccagaactaaagtagaacccagttcttcccaacactatcttggtcctccttactccattaattcaaatgagagcctttgtgtagtgggcactgtagttggaaccaagggggcaaagatacgtaaaacagagttcagttttttccaaagagctggcatctaggagacacacatacacacaaaaaggttacacatgaatttgggggttagagactttggaatcagacagattcgtatttgagaccagacctcactgtttactagttatgcaacggtgggcaaatcattctgcccctttaaaccacagtggtcttacctcacaggattgtcaggagaattgaatgagatggcagaggaaagatgtttagcacagagtctggttcatggtaagcatccagtacgtattagctatttttattagcattaatacaaggcaatgacagagacacatgaaggctattaagagagcaaggtctggggacacctatcctccatcgtggagggtggggggtggggtgggcgggggcagtgtatctggaagaactgaatcttagagaatggctttaatgattgttcttacaaaacaatacttatctttgttcttttgttcttttcatctgtccatccacgtagttatccaacgcctacagtgagcccagcactttacaaaatgattctcagcagggctcccttgaataaagggttttcctagggcacttaaaatatgagcacatttacaaaaattatactcacacaccttttcagagttatacctactgagtgaaatgaggtatatcaatggtctattctgatcctagctagaggtaacagcttaagagaaacaaacctataaacagaaccttaacaagatgtcctttggtaacaaagtgaaaagtccttcccctggaggccacgttaaagtggtctgctgaatgagaaccctactctcatcagcagaggtggggcctgagctactggggacttcaatcgtgtctgccttcaccattcacttaaaagagggaaattatccagctaaatgcttactcatatgcaatatctgcttgtcaaaggtagcacagataataatcccatactttccactttgtatgatgattacaacttcctctccattcattctctcaactgacctggtagccaaatgagccaatctggataaagcagagatatagccaaggtgggctggcctgtgaactttcttttgaaaatgggttctgctactgaagatatgtatcttcaatacctaacatagtgacatatcacagtcaccagatatgatactttgtaagctggataattagttcaaatcaatcccttacatggcacactttgtgagaaggaagttggaacctatctgttcccctgatggacaagactgattcctttctacagagtgccttgaactactgcagaagaaaaccaccacccttcaagagcacccagaagctgtgtgcagctggactcctggaaggctctccctgccttgggatgctgccccgtataaaaaaatgtaggaccaggtcctctgggtaatggtatttgtgactttctttctcaaagaactaggttcttcgagatgggattagacttccattactatctgaaatgtgaggtgaagaaactgaaaaaaaagcaagcctttcaatcatgagaaaatgcagttgctatgatgccaaaatagaacactgtgtttttaaggtttctagaaactgaggcaaagaggagtcacagaaaattcagctagcaagagtatcatgaaaaaaacaaacatctttgtttcttaaatgctttagagagacactcttacctgaggaattacagttcctcactgtattactcaaaagcaatatgtccccaacatcatggccacaaaaacatagatgtagatttcttatgctctcaatatattacaattcgctagaaaattcagaggcctaacaccaaggtcagatcctgaagccattctctgaggggctaagggtcgtggtatatattgctatcatatagtagtctaatatcatccaaggattgatcctaaaacacttcaaaaaggaaattgatacaggctatctcttaaattaccttctatgtacatcatctctcacaaccagagtcttaacagaagctgtatgtccaacagagtgagattatattctgtttatcaaaggtctgggttctcccgagaggctcttacattccaagattgatgctctaagcaattcattaattcaagcataaaaaactcatctgattttagggaacagttgacatgtttacctaaagttgtaaaaaccagacttattaaaatgcctcagaagaaggcttcaaaaattatttccattctcaaaatgttattgctcccaattgtcatatatcaatggctccccagtcagtcatgctctgcctaagcaacattacaaaacatcagacggtgccgatggcaattccactgggttcctccaaacccagcccataaagcctacagaggaaatagaaagatgacagaatgcatacactttatttttgacctatcctgatttccggcaggctttggatatgggacgacttttatggctgcaataattttattgtaaagacccagtataggaatttcttctgggaaaatattttatatcaagttgtcaagcaaaaagcaaggtatgtttgttctcactccaagacaccactgaactcagagcaggaacacagctgttttcaaacattagactgcagctcctagtgtcagtgggtcaggagccttccatggccattcctacagggaatcgtgtacttcctgggatgtcatgtttatggtcgggctcccattgcattcatcttatttactctttaaaaagaaaaacaccaagtctgaccagaacaaacaaacaaacaaaagcaaaacaaaaaggggggaaagaaattacttaaatttataaatgatgtgtctagagtgctatttcatttttgcttataaaaatggcattcatgcttaaaaccgtctatcggagtgataagattggtatgatatggtctccacctgacttaaaggacctatgtttgagcgttgttgttctcttctcaccgcagccataatgtgatataccctatgacattcattaggctcttgtagcacacatttgacattagcacagggataaagtagggcagggagtgtggtgacagagctgtgggtgggaagagtgaagctttaaaccctcaacagtacaacttttcccctcccagagaagtgactctaaccaggaattacagggcctctaaatataccttcccataatttgtccatattctctcttccttcccaattctctcttaaatatttattctgtgttaatacaagtgtggtgttctgctgaactgggtggtggtttagaaaatgcatatgaagcccatatcttaaaccttctgttttagtctggaatataagcttaacaacatcttcccccaacacatacataaaaccataatcaatatgggacagctagtgtattagataaatgtgtatccccagactcagtgcaattgggattgagaaagggactgagaatggtcaagtacaggtgtgatgagaaatctaggtcgcatttgcagaggtggaaggaaagaggatgtttgggggaaacatgaacccaggtactcaggcaaacatgacacgaatgaatataggaagaaggagaatccaaggttcatgataccagggaagctccctaaagttagaaagttaatatctagtaaagatagaattacatgaacaataatttactttgaaagagtgttgcataggcaacagtatatggctgtcagttttaacctattttccaggagctaagatcgaccctaaccctaccttaccctacttacgtactccaaagatgttctgctgtcacttgaaagatgcttatcagaaggcatcatcattctagaaacagccacttcaagctcttgaccttccctcaactctaaaggctttgtaaattagctcaatggaggttagaaaagacttctcactggtgtaattagtggtgttagagatatgtggattgcctattaacatgatgctatcaattgactgagtctcttccaaattcatgttaaaatcctcatccccaatgtgatggtttcaaaaggtgggccttaggaaggtgcttaggtcatgatggtagaaccctcacgaatgggattagtgcccttacaaaagagaccccagagagctcgcttgtcccttctactatgtgaggacacagtgagaaggtggctgtctataaaccaggaagcagggccctaccagatgctgaatttgctctcgccttgatcttggacttcccagacttcagaactgtgagaaatgtctattgtttataagccacccagcttatggcatgttgttatagtagaccaaacagactaagacatgtagcattggacacttcatctgttgatgacagagatatgaaagaacctgaaagacccagccttactctgtgtaatggtgcccacagcttgattctaaaacaatcttctacatagccactggcttggggggttcttgttgcctaatgctgacaaaggaatcctgctccatgttaacttttcatgtaaggtactgtcagcatatctaaagatcagaaaacaggctcagtgactgctttttatgtagctgatgtttatataaatagcagaatttggtaaatgtgtacttttgtatgtgggaacacaattgaaggagacctttaactcattatctcaactactggaggttatcctaaaactccccttaattaaaaataaacaaattggcttagaggttagtttttagcacacttgaatgaagacatttattagaaacaaacatgaaaactctaacatttttagaagcatgaaaaattggagtagttatgtgtgacacatgcctaatagcaaacttttaaaacaatgcatttttattaaatcagaacctaaatacacacacagtaaagtacctctaattttcaaacacatggaatacatggcttccctgagagaatatctctaagatgcagtaagatcccagacaattatagaaagattatgtatttgcagcttagtcaagggcattttactaaggtctggcatttaaaaactaatggctgtttgataactaacattccactagttctctcaataataacaaattagtaaataaaattatgttggtacatacatatataaccaatctttatcaattcatatatagacaatacacacctatctaatactcaaaggcaagaaaaagccattcccctttctctacaccaagcagtatgatacacatttcttgctcactaatcttgaatccctagatatttgaacatgggcatttgttgctgacagccaccgccagacaaagctccatgacctggctccactccaggagaggccacagagagggcttcataccattcttggaaagcattcaactaccacatgcagcctcatctcacaccgaaaaaaaaagatctcacgttgcagacagcttcactataatgttaacattcttggttgttacacacacatttgacaaaaaatgcaagcctctagatatagccacgtttattgtacaatgccaatattgtgttcaaacacaaaattctctatcattttaggcaacaccacctgcagttttattctctcacttcccaacctcttaagccaaagaaatgagaaggtgctcttccttctattcactccccaacacctaaatacaacactgggtaagactcagttcctgcccacagggagctcagagggaggcattcctgtactttctaaattgcacaagatgtcactccccctctaactatggctaaaaggacgaaaaacagacaaaaacaaaatccaccttgctccagctctttaagctgccctcctgcctactaatacctttcattctcatccagttctgatgtttctttacctgtcatttactttaattacttcaaacacatgttctttctggttccagcgttccttctttcccaagtgtacttgttttttttgtgtgcgttttaaaattctattctgcaaagcttgctttcccatgaaacccagactgttttctacaggattttgataagccaaagtgttgctgtcacacgcaatgccattgctgctcctatttgcctctttcctagggtctctgcaactttctgcgaaccctctacacacctctctaactttccgctgaaaaagtatgctcatagaactaggaataaacattaaagcaatcagaggcctcgaggaactaagtttagcaggctaataagaaataccacaaggggttaaaatattaagcagaatgtgaacactgccctaagagttacaagtgccatgcaggcttggaagggggagataaagaaatctgttttttagatgccatgtgaaatgcaaggcatggtggtctcacagtgttcatggctttcagtaaaggctcataaccaccatgacccttcaggcagttcacagcaagcagtgtcctaataaaaatatttagtcataaaagagaacaacgacataacctgaagactgcttggacccttaatgatgaaaggctgactggctacactgacaagcggctttgacaacctcacgtcaaagcacgcgggtaagagagaaaaggcaagctcagggctcttttcagtactgagagtggtgggcacagtagctctacttccctgtttctgaagctgcctgcctaaaaagtaaggttggtttctaattcctgacacgtgttctctttcatacccactcacagtgaatgacaacttccctttgttgcctctgtcactcagaattctgtaattcacttacccaaagctactttgtccgaaagaggacagacaaatcagctaatccttaagtccttttcagcactaaagaatttccctgcagggtgcatcatttattttttttctccacttcctaagtcctcctcattcctaatgcaaagaacacaacatgagggacccaatcagccaagtccagaatttgtaggactgatgttttttgcaatagtattattgtctctctcatttccctcctcccacccctgtccccatattccggacttaaaatacaaggtcacgcacaatggtgtgaattaacaaaaatccaaggccacacactgagcagctccaacttcagccatgaaaagcatcctgggctacggccaatgccctcctctcattcccctggtgctgctttcaaagccacaaagaacgacggagctgagaaacagccccactcaaccaccaggccacatcccagtggggagacactaccacatgctcagtcctctgcccagagatcctttctccaccacattcacaaactctgtttaatcaaactccatgaactgagttgccttgcgtgttcattcgctgcgctcctatactgggtgccatggaacaatggtagatccttgagtagcttataggcaaacttgagaatctaagagataaatacttaaaatgtaaagtgatgtgtactagatcataggagggcatgagatcctatagcaggctaggtttgtttcttgactccttctgcttcttcatccaagccccagccttatcagtatcagtgcctaaaggcttctgcagctctacaccactccaactttactcactcagttcaagtcatcagcatcctcctcccagatcacttggatctgctaattgttcttaccacttctaatctcaacaccctccaagccattttccacactgtagccaagcgcaccttctaaagctcaagtttcatgtggtggcctgcccattctccatgtaaaaaatatcagacaatggctcctcattgccatcaggataaagcccacattgcaatgccatttgtaaccccttctaccttccccatgctctactggcacctggttcagccttactggaaaacctgcagtgaggctgaacctccaaatccccatgctcaaccctgcccttggggctttgcacacaaaccatttcccttacttggaacacaatccccatttcccttacctggaacacaatcctcatctctcccaccaccccctttaccctttacttggctggctactgccagccctttaagtttgggctcagctatcacttcctccagaagcctttgctgacaaccctaggcagaggtgaatgcatcctctttaggtctctgctgtcagacttccatgttcaactacactgtattttagttgcttggtataatagcttgtctatttcctctactagacttcagacaacttggtggggggaggaaagggagattagaatggaaccttaagagatgtttcttaatatctgttgaaaaaaggatctcaagtatgacttgtttacctgtgtatctttgtccttagcatagtgctggctatggtttgaatactgcacccttcaaaattgaggtattgaaactcagtggccaatgtgatagtggttaagggtgggggttggtctttgggaagtgattaggttatgagggcttttgccctcatgaatgggattaaggctcttataaaagacggttcatgggctggcgggggagggcggttcggctgacttgcccttctgcctgccatcaagtgaggacacagtgttcttcccctccaatggatgcagcatccaagccctcttagaagcagagatcagaacctcagcagacaataagcctgccggcgcaatgatcttggacgttcccagcttccagaaataataaataactttctgttctttattagttgactagtttctggtatcccattacctctcccttcactacgagagagcctcagttactatctccaggccaagttgaagccattagttagtcattctacaaatatttagtaaatgcctacactcagtaggggctggaatgaccacactctgatctctcaaagaaaccaccaatcgctttgttgttcaatcaaaactgttgtttctcagttatatcttgtttgatggcaagcccttctcctttccctgttccagaggtcaggaaactatggcccatgagcaaaatctgaccttctacctgtttttgtgaataaagttttattggaacataggtatgccccctttatttacatagtgcctatggttgcttttgctgcaaaaatggcagaattaagaaattgcaccagagaccatataccctgcaaaaactgtaatattttctgcctggtccattacagaaaatgtctgccaacccttgccctacctattataacttatgggtttccttcctacctttgtgactgtgactggacaggctcttgttattctgctgcccaatgaaggtataagaagtcctaggaacactagctccccaggattctgtcagtctgctttttaacctgacacgttctttgtctttctaagatggttcccatggcccctgaacatccctccatcagtgacctatagtataaataatctgtaagcatttttgtcttccccaacagacgtggctccttgaggacaaggcccatgtcttacagacataattcagcacagtgacaggcacacagtagccatcaaaaaatgttaactaggtagatgagtgtttacaaggtatttttaaaataactatatttaaaggctcctgacaaaatgactatatttaaaggctcagccatagtcccttggtgagaacacagtcattcaactgatgaaatttctattcttttgtatcagttttgacttgcctatagatgggtgacaaagtagaaaccccgaataggggatttcccactaggataagggttgaaagtctgactcccgttcactagctgtaggatcttagttaaggtgctcactctcagttgcctcctctgcaaaacgaagacaatgaaataattcctctatctcacagggtggctatgaaaccaataatatgtgtaaaatgcccactacctttgtcaagcaattttggtgctcaataagtagaaacaattattactatggacaaagtcttctgccttaaggctccaagtacactgacaatgaacatggctagggtcgtctcagctatgttatagcatcacacttgatcttttcatagcaggagccctgattcaggtggtagtttcatattttaaattatgaaaacaagcagctaggtcttatattaatactaatccttcaagataaaagaccaaactccaaaggaggagcttctctctctctctcccataaagattcattggttaaaaagcactagtggtgatactaaattgaagcatcaacaaactgttctgtaaattgtcttttcctgatagaatttaccataatttgttttttcagctatagcacatagcttggaatgtaatgcacacattttgaagagtagacattttgataatcaaaaggacaatattaagttgattttttatagccttattactgcaaagatattattttctaagctaatgtacatacaaaacttcatctttctttaaaggtaagtacatgggggctagaacagagatacttgagttttgtatgcatcaaaacaaaaacagggagtaataccaacacatttagcaaaaagtaaaaaacagatcccactcgtgtatgaaaatttttggaggagctgggaatcaaggaggaaagtggggctccaagctaatcagggcaaactctgccttccacctgtgcccctaatctgatgctccggttgcatgacatgactatgacggatggccagggtgctgtcgtttatcttttggagtgaaaccggagaactcaggcagagcccagtgagcacttctcatgaaaatgctgtcctatctaatcccaggagacaagagaaacactgagaggtcagaaaggacatgagcacatgagtgtgcacaccacgcctgtatgttcctttcctcttccaacacattttcggggactgaggaagtgtgccgcacatatcccaaacagaatttctcagtattttctgcagtttgatctgtcccatgctgaccagacactgtaaatagtttagtttagaaagaagccagaaatcctaagtgagcatctggctcttaagaagccagaaggatggttgcacgggggtgggggtgaggtgggaaactggggggagtatggagagtgggggggtgggggagccctttacccagcttctcttactcacgagcactggcgacaagcgacattggcttatcgcctcagctaggataaataactctaaatgtgtgctgggtaggagctttcatgccctggccttcaatagttttattctttcacgtctctaacgtctgcagcttcctgagattggctggtatttttgtcactgggctttcgggctgggggctgggcagagctgaatgtcaggcaagggtaaagggcacctgtgatctgctgagtgcctccgctttctcctccttgttcctgacattaccgcccgctcaaccaggagggcagaaggtgggtcagaataatcagttaagtgtattagggttttctcctccttcactacaaatcccacaagtgcaactaatgagacaatgcccagaggtagaaatgaacttcataacaccaaagtacgggtgtatttcaatttatgcgagttaaaaaatgttaaacaagaaaagcaaataagtctcagagctgttttttcacattacaaatggaactcaatacagattttagaatataaatatcctctcaggcatttaaaataatgtgttcacaaggctttgatttgcacatgatgttggcaatatcttttgtgcaagatagacttggggaaaaaaatcctcagttttaaatttttagttactttcaaaataaaagatgtaaattaataactattcttccgaatagaaggggacgcattataagaatagcttttgaaataatgtagaagaatatccacagaaattctcaacatcgtatggataatatgaaatccgtgttttgttttggttttgaatgggagtaaaggtgaagagtctaaaaaaagaaattttttaaattcctgatataacagagaaatgcagtaaaacagcaggtttcaaactgtcctctggctctcgagagtgtttccaggtttctacaaacaataaaatattggctgttaaacccagaataaaacacccgagaagataataacaagttcgctgcttttccttttgggttgttttaaatgttggggtgctgaagatttcatttgaacaaagagttctgttaccaaataagtttggaagctattgtttgggaggtgccgtgcagtctctgtacacaggaaggttaaaggaaacggcccttggcaatgaattctggaggcccttcctggggggccctgaactcctgtgaggacttccaataaaaagtcagtagcattaagaatcagcaattaaaattcaatgatcagctgctatgtttaaccacaaatgtatctaaaaagctggtgttaacatgtttttattttcctaatagcttatttgaaaaaaggtgatgttaaaacaggatctcaaaaatagatgattttgtattacgttagtaatagtatattattgatagtctataatcattgctttaaaatttcaataataggtcccagttggaggaccgtataatgaattcccttataccgattttctctacttttgtatatggctgaaactttccataataaagtgaggtttgttttcttaaagtcccagcaggccagaaactatgttaaaggctaaatttcatgtccctcaaccacagtggacaaggtttagaggagtgctataaagagaatattgattcctcttcatccagtccaacctggccttcagaatgactcccactaatgtttttcctatgccattttctactgtataccacacacccaaccaacttggtacaaataaatgtgactcacaacatcctcccggtcagtgccaaccccttattgaaattagatagtatacatcctccgggttcattctttttctaagttaatttggctaataaaagtcctttacatttccatgttaactttggaatctgcatgtcaatttctttttcttttttttttttgagacggagtcttgctctgtcaccccggctggagtgcagtggcgcaatctcggctcactgcaagctccacctcccgggttcacgccattttcctgccgcagcctcctcagtagctgggattacaggcgcccgccaccacgcccagctaatttttttgtattttttagtagagacagggtttcaccgtgttagccaggatggtctcgatctcctgacctcatgatccacccacctcggcctcctaaagtgctgggatttcaggcgtgagccactgcgcccggccagcatgtcaatttctactgaaatgtctgctgagattttaattgagatctatagatcaattgagagaatttatatcatagcaacattgagttttctgatctatgaatacagcagcttgctccatttatttagatcatttcttttattaatgtttgtattttttagtgcacgatcttgcacatctgttgtcaaatttatctctaagtatttcatatttttgacagattatgatactgttttagaatttcaatttctgattgttcattactagaatacagaaatataatggatttttctgtatttccttggtatcttgtaaccatgtaaaattcacttattagtcctaacaaaacagttttctttgtagataccgtaggattttctacacagacagttatgttatctttgaataaagaaatttttacatttccctcttaagatctggaagccttttattgtttttccttgccttactgcactggctagaacatctagtgcaatgttgaacagacgtggtgaacacttttagttggcacctaatactaaaagaaaagaagcagtgaggccgggcatggtggctcatgcctataatcccagcacttttggagagcaaggcgtgtggattgcttgagcccaggagttcaagaccagcctgggcagcatggcaaaaccatgtctctaccaaaaatacaaaaagttagccaggtatggtggtacatgcctgtggtcccagctactcaggagactgaggtgggagaatcacctgagctggggaagtcaaggctgcagtgagccgtgatcgtgccactgcactccagtctgggtgacacagtgagacgctgtcataaaagaaaataagagaaaagaagtggtgaacacagatgtgcttgcatttatcccagtctgggtgaaaccacgtttgcaaaaattgtaactgagacagtgaaggagacctgaactaaccaactccatctgcttctaaccttcaagctgtctttgtccattcctgggcacaggacaaactaactttgggaggaacttagtttatggtttagctttgaaacgaagatgataacagccctttcccaaaacaattccccttcctgcctggggactggactgcctttgcaggactaacaaattagtcataagattagaaattatggtttaggaggcatgcaactggaggctatgagattttaaacctctccaaattgcttctggcaataatattactattgtaaaacctaagatcagtggttgagatattttgcagaccctgcactccatggatcagctggcaccacccaggtggatacactggctcatctggtcttgtggacctgactgaggaactgactcagtgcaagaggtcagcttcaactccctatgatttcatctctggcttgaacaatcagaactcccgattcactgccccccgcccccaccactaaattatcctttaaaactgtgatcctcgaacatttgggaagactgatttgagtaataatacaactccagtctcccacacagctgactctgcatgaattactctttctctattgcaattcccctgtcttgataaattgtctaggcagcaggcaaagtaagcccgttgggtggttacattaggaagggggagatacttttggtctttgttatgtatattaagatgctggctgtaggttttttcatagctttctggtgtcaggttgagaaagttccctctattcttaaattcctgagagttttgagggttttaattttaaatcatgaatgcatgttacattttgtcaattctttttctatatttattaagattcttgtatcactcttctttagtctgttaatatggtgatttacactgatttttgaatactgaactagctttgcgttgccaggattaacctcactttgtcatgatgtattatcatttttaatatattattgggtttgatttgctaaaattgtctttttttacatccatgttcacaaagatattgtattgctctgtacttttctttcattgtaatacattttctgattttggcattaaggtaatcttggcctcataaagttcctaagtattccctctacttcaatttttttggaaagaatttatgtagagttggtattatttctttcttaaatgaattcaccagtgaatctaggtcctatctttagtaatatccaaagtcacaaagccaactacaactcatttgtcagatattaaatgtattaacaggataaaaatacatttgtaatggaatgtataagaagaagagattaattctcactgggggagaaacgaagagaatattcaaatcacattttgaaatggcacatatttctgttgtttgacttatggggcaatgatacagtgtcaaacactctgctaggagctgggaatgcaaaagtgaccaagatacaacccctatcctcaaggggaccactgcacccagtgcactgtcaggggaaggagatatggtaaaaagaacacacaaccctggggtaggatgtaggagtcttcaaggaaggctctcctgtgggtatgatacctgagccaatcagagattacaaaggcgaagaaggcaaggactattccacccatcattgcaactcagcacctagggctcagatatttttctgcaggtgagctttgccagactactgtgaggaagtcaaaatgtgtatcccaggcagccaggacttcattgacagggacggtgacacacgtataaaaatgggacgcaaacgaagctgtcagggcggcttccagtgtgatacagggagtgcaagaagatgaggctgagaggcaggcaggagatttatcatgcaacgtctcatgtgcctagggcagggcaatgagagcagaagttgctgatggcccataagcatgttctgtttgtgaaatacttgaattaattaccaaagtttaaaactctgggacttcacaaacaaagttgggtttttgccttctcttaagaacatctagccatacaaaatccatgatccctagagttgaaaagtacctgttccccttggagctcttctagttctccaaggtctcaacatattctggccctggggatgcgtttgaatttctgaaactgctattagataacatcactctggtgatactgccaagcctgtaacaggaagactggtggcaaagacagggcaggagatccaacaagtctatattaaggcagtggaagtagggactggaaaggaagagaggctacttgagaattttttttaaagcagggattaaatggtaattcgataaagggaaagggagagggagaagtcaaagttcctagcctagaccacagaatgaccgatctacaaagaagggcagaaactggtaaactggtcagggcaagaggagcacaagggcagagaaaatgatgcctcatttgttcataggtttgtttctgttacctggctagagatttgacatttaaccaacaaataagtacttcattttcagtacatctagcccaaaactggcactccccacaaaccttctgttccacgtactggcattttctccctgcttgcaggccaaggactcctagaccttccccatgtgaatcacaaactccttgctctgctgctacaccaaccagcaacacttcctgggactcaccatttcagatcttttacaaacaataactcaaggaatgctcataccaattcttggaggagtaggtattgttatatagtttttgttttgttttgtttgagacagagtctcactcactcactctgtcacccaggctggagtgcagtggtgtgatttcggctcactgcaacctccgcctcccaggttcaagtgattctcctgcctcagccttccgagtagttgggatcaggcacgcgcgaccacatccggctaatttttgtgtttttagtagagatggggtttcaccatgttggccagactggtctggaactcctggcctcaagtgatcagcccgtctcggcctcccaaagtgctaggattacaggcgtgagccactgcctctggccaagtattgttatatagtttttatagtgaatgcatgccaactatttttctttattcaaagtctgaattggaggggcctgaaacaaaaacgcctgttttcctcacaggaactgccctcgtccttaagcattttctaatggtggcataaccactgaatcttttaacagcactgtgggaagatcagaagactttaaaggctcccagacttggtcaactgtatgttttcctctgtgtaaattccaaaagtatcaccactaatccaaacaacagctcttcaagcaggagttaatagaggaaaaacctcaactgaaaggtcaggaaaaggactttcctgaagtacaaataatggccatgtgtggttgctactaagttcaaatcttttacagatgcaacaagataagtctaagttcacactcctgttcgcaaaaacaatccaaccagggaatacgaaaatgactccttaggaaaagatttgccacatcatcaattacatagggcagacaggctgaaaattgaacagaaggtggtatgtggaccatgatctgagaggtacccagacaggatataagaaatgtaggagtggtgaccctgttcctagttgatcttatactcggttaaaaataaaaagaagctgaagaatgaggccacatccagaagagccaagcgactgacatgtctgtgtaatactttatttatcatccaaagccttatatacattgctttacttggtgacaacctctgagctgagcacttccagattcttacatagagtcaaagatgtcaacatcataacactagttccgatctgacttcacgtatgacacttatgtgttttcctgtatattctgttgaactaattttattgacgaattttcttctaaaattaccctcaacgtattctgacagccaccaacctaaagatctcagttccaatccacccaggcagtcatcacttgaattctgccaccatttagaattgctctacctctaagagctcagtgtcaagattctcttcttcaacaaaaacttctcaaccacccttccactttccccacctcactcttactaaactttctctgggcctcccgagttaccttctggaatttactgaaagctggtgacactgatgacattctcctagtcattccctctgaatactcacaccctcatacagcctgaacttaaagagtacttcatgaatatatgctccatggagtccttcacctccttgatcttctaacacaattacagtaagaggataagaatcactacccaggaaacctataccaggcacctcctctgttcctggttcactgacatgtgctgtatagtcacaaacacaggctcacaggcatcccaggaagcagtgagaacaatggaatgtcagaaccagaaaggatattaggtgattacatctgatgtcttgactttagcgatgaaaaaaccaaggttaaagtgagagagctggcaggtggtagaggtaacacaagaaacgtcttgggccaggcgtggtggctcatgactataatcccagcactttggaaggccaaggcaggcggatcacttgaggccaggggttccagaccagactggccagcatggcaaaaccctgtctctattaaaaatacaaaacaaattagccaggtgcggtggcaggtgcctgtaattccagctacacagggggctgaggctggagaattgcttgaacccgcaaggcgaaggttgcagtgagccacaattgtgccaccatactccagcctgggctctgtctctaaacaaacaaacaaacaaacattttcttcccccaaccccagaaagctaacacaagaaacctttctggagaggaaaaaaagttttattgggataaatttattctattccatggaatggaactgaggggccaggatgggaccaaaaacaatgactcacaagggatgaatgtaactggaaaggcaggagccatgatggagaaaaatgagatgtgctcagattttagtttgcagtcaacaggaaatcaatgaacatatctgcacaggagtgcaacaaggtgaaaagattcctggagaagtgttgtggcacccacgcaaagaacaaaatcaggctttcaaatgacagcttttattttcaaattaaattatgtgtgtgtttaaatgccacaacatctggaagtaactaacaatttagtttgaggggctagggtcattaactaccattttagaagaaaacatgttacaatttaaatgatttccatatgcttttcaggagcttaaattaagctaattgaacactttcataaaccaataaggaacaacatcccttaaaaatgttgaaagtatttatctctaggatacaaaattatgggtaattttagtgtttaaaattctaactttacaatgttttatctgtggtattatttatcactgggtgaagaggccttataagatagtcttgactcaggcctgagttcaaactctgtttctgctattaaccagttgaatgatttcaacttggttattttaattaccttaacagttttgacatctgaaaatagggataactatacctgacttgtatattactgtgaacaattaagaatgtatattttgttatttgctaaggataaggcaatgcagttatgacagggatatttaacagtagcagagacacccaggctcagtttttcttttactttttcgatgtgatatgacaacttatttctaaaagggactaattaagtgactttgtttagcattagagcattacaaagccttaaatggttaacaaaaattgcccataatatttctctagacacatttgagactcttgaagttatctctacctattatcctgtttctagagcaacttctatcaatggtatcccaacaccatcttcaaagaatacgtttcacagtatcttcattgcaccagaaaatataagtctgttcaagtctgccaaataatctggtgttaggcactataagaagtatatagccataccttagataactcaaacacccattttccacatatttcattcctgaagtagaccataatttatagtaactcgaattatttacatggtgccttccagctagagaacatggttctcaaatttgaattcagctcctatcctatagctgtggtgcttattcattcatgtaactaatatttgtactttaatgatttatagaataatatcccttccattttaaaaaatctttaaagaaaatcatatgtttctatagacagtagaacataagcatgtctagaacaaacaatatggggatggcttataaatttttcataagcaagatccaaatcttaaaactactgtataactataatactataaagtaggagatggacgccaaacacattccattcctataataaaagtaaaaagtagtctcttttcccctacaagatctatcattttccattattccgcattttttagacctgccatggaaatcctacagtaaagacaatctgtaaaggaagactgctcatcagctgtcagtctgatctttcattcttggaccaatgcatccttctagttaacggctggtctaatttagtcaaacccaggtattacatagcaacagatgatgctactgtcaacgaaatcacaaggtatatgctttagccccaatgagcctgggctcaattaaacttaatagatcagagaatttgcctacttaagtaggtgttgaatgaacaaatttgcttctaagaccacaggagaaaacccttaaacattctgaataggtacagggcctgctatggcttgaaaatggtttgttcccaccaaaattcgtgttgaggcatggtttctaatgtaatggtgttgagtggtggtgggaactttaagaggtgtttgggtcctgagggacccatgctgtctcgtgagaatgagttcttacacacacacacctaccatacacacacacacaccaccccccgaatggtgctggaggattcaggcagtggagggagtggtaagaagggtattgccagacttacagaaagctccaaacggcctcaatgttaaggtgacatttgagtagacctataggaagtgagcaacaagcctggggaaagtgtggctctgagaagttgttgttgaaatgctagaggaacagcaaggtgaccaatgtatctggggcagcaaaaacaagaaggaaggtggaggtggtggtaggggtagggtatagatcatacagggcccactttcaggacttaagaggcttttatactgagtgcaagagaaaaggggttttgagcagaggaataacatgaattgacttatattttaaaagaatcactcagctgctgtggtgagaacagactgtagagggtaaggatggatgcagagaccagttacaaaaacaagaaacacggagcaaataagccatcaaaaacaggtgacacacacgctcatagcttagctgtgggtttggtgacagattactgtggggtatgaagaagaagaatcaagaaacacgtcaatgtttttggccggaaaaatggaaggattgggttgccatttacatatatgggaaagaatgtggagtccagagtttgattttatcatgtttagttttaaatacctattaaacactgaagaaaagatgaagaggcagctgaatatgagtctggaattatggcctgggctggcagtatggacttagaggtcagtgtttggatggttttttacagccctggcactgggtgagaagaggtggaaggacagggctttaggacatcccaacatggcggatggggaggggctgaagaatcggcagagacgaagaagggatagccagtgatgtgagaaaacagccaagagacagctgtgttctggccacactgttacacctgaactaaatgcctatttaaaatgttcagaatctgaaaaaatactgctgtttctttaaagaagtataaggttaaatatcctgtaagtaaatacttaatgataactaatagcaaccagaaactgcaatcagatgtttttccaaacacctagtactgtgaaatatcagtgatttcaattaacacgcaaatggaggaggttagcttaaaaagaaaagatgaaaagttttcaggtcagcaaaagtgatcctcctgaggattactggcccaaacttttctaatgccctctgcatgggtttaggatacaatcactccggcaagtgtttttagtgatctagagaactattttgcaattacagtcatgtgctgcataacaacattttagtcaaagacaggccacatatacaacggtggtcctgtaagattgtaataccacatttttactataccttttctatgtttagatatgcttagatacgcaaatacttaccactgtgctactattggctacagtactcagtactcagtacagtaacatgctgtacaggtctgtagcataggagcaacaggctacaccatatggcctagatgtgtagtaagtagactgtgccgtctaaatttgtgtaaggacactatgaagtttgaacaactgatcccctaacaacacatttctcaaaatgtatcccagttgttaagggaagcatcactaccatatatgccgcatttctgctccactacaatcttctctctagctaatgtgtagtcaaaggatggaagcaaattgaaatcttcatatgattctcagtccccagtcaagaagatgttaaatagtggattctaaaaatggccattgtagagttaaattgcctaatcctttttcctacaaaattagggcagcagtaagttttgtttttttgttttggttttttacttttactgttactggatgttaacagttgctttcatcatttaaaaatatcttcattaagaattcaatttgaagactctcttaagacagctaacacatcaatgtccttgaaatatgacttttaggtcatacaattttagataacagagggagagggagaacttatatctcatacataaacaacacagaacatcaatgtgttttcagaaactaatcaatgtgatatcacaaatgttaataagagggccctaatcaaattcttatatgcaacattgcccatcttatcattccttctagcataatgagctgaaagctataataccttgacatttcttcctttaacagagagaatttttcacactgacttttcaattcagcaaagctatactgatccaacaagaattaaggatctagtccatctaaagcagtaaaaatatattaacatagtctaatttggaaaaaggtttactcttcctatatttggaggatacaagttaatgtactattttgcagatataaatatgtggtgcaatgaggaaagaatcccagtgtccattttcacctcagttatgtgaacctagctacatgactaccttcacatattgtgatttctctaaaatgaaaactaccattccattgactttctcttcaatcagttgagctgtattactacagaggattgcaaaacagaccattatctcaattcttattatcatgctcctacgtgctccccataccttaaaggaattttctgattctaaagagatgagcccgacaaacactcccccagctacaggaatttcttggattgtagaactgatatactgcagtcaaaaattttaaagacttcattctgaaaagcaaatcctcttctccaaaactctaattccagaaacgtttcctaagggggaaaaaaaatctcaagagcttgaccttaaatcactggtgagaaatgcagagtaagccttttttgttttgttttttactgaggattgaggtactaaaacatttccctatttcagtgcttctcactccctgcgagtctctcccttttaccataagaagagagtttcccagttttagaaatttcttaatgtcacacttccaactctttaatttaggagttcagtttgtattacattctcacacatcaccagtaaatatgcttccatctaaaatctgtcttaggacacaaatccttacaaagtggtgtccttttgtttcagttttgtaaattagatattcttaccaagttacaatgaaagagacctgctatttagccagatcacaactcagaatattcatatgaccacaggacatgggtgatgtttcacccattagtcatggctgtctcccatgttcactttgttcctacaggcaaatatgttaatgagctttctcattaatcctctttcccccatatcatctctaaaatggaatttcctcctaggaagaaaatgtcaacaaattttcttgacagctatgaaagttacaagtcatgtctctaagatagtcgtgattaccaatttgccaatgtgtctgaaagaaatagcaaaaatatgtattgaactttgagacaaatatcatggttttgctgatatccagtgggtttttgcaagctgtcatatttattataaggctatttcacatagtcagtgttgccaatgaacatccaaatcattgtctaccttagtagacttcaactctattaatccccagtaatctctagtttttactatatatctgacaacttactgacactaagttgtacaggacctatataattttgaatctaaacaacctcctggttttataatgtagactcaaactatgaaatacaattgcctaaatagtttatcaccacctcaagcacaaagatactatgttatttgttaactagctttcaccttaaagcaaactctaaaataaaagcaaaaataaaatgtatcacttttaacattgaattttctaaactccaggggaaaaaagaacaagcatgaaagtcacatccatccacagtgaagtaggaaaacaacatatccagaatccttttcagatttgcatttctgcttaatccatttaatgtagtatggttgtattctatcttccaatgctgggatactgggtctcagtggatttcagtgggtgaatgaggagtccagttacataattttggaatcaatcttccagaattggatgcctgaacactagcacataatagcaacaggccatgtgagtcaacatgtccacacccttgcccaagtctatcagctttcaggcatctccaaacactccctttgccttcctattctgaattcgcacgcccaaaaaagctgagatcagagactctgtcagtttacttggtagttttttcacattaactttcagattcagattaatgcataattatacacacatcaatgtaccaacacttcaaaaaacctttaatggaaagtactttgaaaatttattaaagcaagaaaggacccatttgaacacaagaatacagaattgcaaattaagtataattaatataatatttatatgaggcagaactttcatacggatctttagaaaaacccagactcttcaccatgtgcagagtgctttaaggaggcttggagccagatggtctgggcttaaagccaggctctaccagttactatgtgacctggggcaggttccttaaattctgtcttctcaactataaaatggagatgatttaaagtatctacccaggagcagaaccaggattggagaagtctgaagcgtatggagcaggcagttattttcaaagacttataatcttttataagtcttgttacagggctaaatgaaatacctgtaaagcacttagcaaagcagccagcaggcaggcagtgctctataaacctgactatcactaatattagtgaagagaggaaatgagtgttataggcccatccactttatctgaggctatcagaggagaggaaacaagcttctttgaaacaaactgttttggaaccaaatggaatatttatttacatggcaagttatatcggcaaatgtatgtaacacctaccatgaactgcaaaagctgaaaatacccatattaagggcggaaagttgccaaaaggtttgatgttttcctataattatcttagataactaaatgtgcatctcaaatgtctaccccaaatgcctctcaatgtctcagactagaatgcatgaatttaagaaaaggtgaccaaggtattcatactacctgctccaaacacaaatatgaatgcaatgaagtttccttaaaacttgacagattctctgaaaccctgggtatcttaagccctcattccaaggaacaatctaatgattgagaaaaggaataaaatggctatttctttgtgatttatagttttggggtgatactaactggcacatatgtgacttctctctcctctctctcactgtccctttgtctccctccaccccaactccagccagatggcaacagcatgtcagaaacatttagtattaaatcaacatttccttgagaattagattcaaatccatcctgagtcacctaagatatatttggctgccccaaatccctagattacaaataacatttaatcctaacaactatgaaattttgtcagtctaacagatggtctaggatgactctgtcagaagcaactctgttcatctgatcattctctgctcttaaatggaaaagaactcataggatggggagacaatggaggaaaaagaacagggagatacagtgtatatgcaaaagagtaagtcctaccactctctaccgcaaacagtggaagggaatgttctgagccacttgtcattaacacagagtttaaacttaaagctctattctgactagcaaataaaagaatcacaggtgctcaatatttgttgactaactaaatttggtggtgcttattttcatgaactgatagtttgtgaaaatgaaatggcctaatcattactttgatgataaaagacattaaaatatatcaagaaacctatttattatataatacaccatcatgatactgaaaattacctttaaatgctccatggtcactttcaatatttagcatatatgagatggattcttcacattactataagtcttaaatcttatataaaaatatataaattttaataaaatcaagggtcatgatcctagcaagccaaggaaagctctgagagcaacacttcaataagaaaatgcaatcagccttaccacattcttcctttgtggagtgtgactagaagtggcaactctgcatcagatcacagtagaggagcacactgcagcatcttcctatgcttcagcatgccagggaagcccccctagacgggctttttactaaacccaaatccctcaaaagaggtctctatctctacccatagtttccaatttccctttaaaaatacagaaaaacagagaatatctgttgagtgcagatattatatatagaaaacaactagagttaaaacaggactcttcttcctgcccatttcctcaaggaaactcagtgctccacccagccttgtgcataatactatacttcttcacaggccccagatatgcagatgacaaatagaacacaagctactaaaagcagtggcaggttccttgttaaattatgaactcttgggttctagcaattcagtccaaaggtagatgaaagagacaaaaatatcttatgaaaggagataaaaccaaggcttgatccaattaggattcttgagttcgctgccagaaattcaggtggtaacctcagtcttctggcaaacttccaagagcatgcgattaccagtgatgctcctaaaatgttccttgtaagttctgcttttcctaggctgtgcccagcagattttctggaattgtttgagtgagctgattctgttcctaaagctgcccgaggtgaaaggtgccatataaaactttaaactgctccacaataaaaatgggctttttaaaaaatcaattgagagaacaccacaaaactctcctcatcctttttcacttcatattctgggttcttcaaaagtctgacttcaatgcacttgagaaatgaatcaaagaggaatttttctctaaataaaaacactagcctctttgttaacttagattccaattatcaaacacacatacattccatattacttccccaaaggaatctccaaataatttttatatctgattagactatgttagtgcattagtttcttcattccactaaacaagagagaggtaaataatcctcagaggaaaacatcaatttaagtggaatttagcacttgggaatgaaaaagatccaactctatcatgcatacaggaactgagtggggaaacacaaataaaatggtgaatgtggatttaacaatcctgccatttgagggcacagtgcttcgcaactctctcctggcccatgtccctttatgataaaactacacaaggagattcagtacttggaaagtattccttcacttaaggtgtaaagaagatttctggactgggcaccatttctcctgcagagaaaccatttcggttaagagattttcccactttacattcctccaggaaacaaatcattttgagggggtattctttcatttcaatgttatgcccagttctgcagcttcaactctgcagaacacaaagaactggagtctgaacatatatctattctgcctccttgacctgattttggtagccgttaaaattcggtcagagtctgctaaagttttagagagttcagaagattgaggcagctttggtgatgttcccgctaccatttccttggtcttctaacctaggtaggtcggatttcctcatgttcaggttgggccccttgggtgcctttgaagagtaaattctatgacaggtaaaaatgctggctgcaagatcctcttttaaaggctctctgatctgcagaatgagtcacactcccatgacaatatgagatggcagctgagagaggtgaggtatgcttgagcctaggtttgaaataatattgctgcatttgcagcataaaccaatatgcctgagcctaggtttgaaataatattgctgcatttgctgcataaaccaagaaggacaccaataatctggaatgcaaatttcaataaattctagaaatgctggtggcagaaaagctttccgggaccagagaaaggcagtatcgaggataagagcatgggctcttggaaccacactcccatgactaaatctcagttgtattacttactagctatttgactttggacatgttacttaaattttttctgtgtctccacttcctcatctgaaaaatggggataattatgtctagggttgttgaggtagttgaagattcattagattatgaattataaaatacttacaatgagtccaggcatataattgagtgccattataatgtttatcttcactgttagcgttgccaacgattaatattacaatttccaagtgagtcactctgaggtacaataaatgattaagctgaacacctaggttagggcagagcagataaaaagccagaagaatacacagagaggagaactaaggcccctccctccctcctcaaactgatcggatgtttgttcagggggacgggggacaggcggggtggctacacttggtgggtggcttcgctgggaggctggaccaggagagcattcccactcttttcttcctcgactgaatttatcatgaagtcttaaaaacataaagctgcaatgaatatactgaaagaaattagactctgaatgtcagttgttttcactctgtcaagttgaaaaaattgagaaggaaagtggcaacggggctcctgatccactggaagtccttggggaattcattaaatacttgctaattgactgaacttgcctgttcaaaggaaacttggaaatgtatacgccttcagggaataaatcatggcgtatacaatccactaagtatcttgcttctcaggagtaaccacagaatatggtttatatgtaagttaaatatttaattggtataaatatactactgagatcactgaggcaaaaatgtgaacattttacttctactttttaatgactacattttgggccattatgcttaaagctaataccacaaaaatttctgaattttgtagcacaaaaatattttaatatgacttggttattttcattgatatgcggaaataaatgtgttccatgaaaagcaaataccaactgcttccactacccatttaatgttcaaaaatatttttatggaaaaacctaaaaacaaaatggcaagccaggagaattggtgcctctgggattagaaggtcagaaaattacctaatcttatttctgccaagaagggttacttgcattaaaatgacagcagtcaccaaggcactgggaggaaacacgggccaggggaaaacgggccggctgtattttagagaaatcacaagcacacacatgggctacaagagaaattatatttgaaaaataaaatggaacttcctcattgattagtctcagctccgcgataatttctgactgattcagaaacttgcaaggctctcatagaacccagacaagagctttgatgttggctggatgcgacacactgccggtgatttaattttgtctaaggcaagaacactgaaaaacaatcagagtcatctcatgcctgaagtatcagagttgtattattttccagtgacagcagaaaaataatttccatgaatgagtatggtttggggagctggggagggaaaaaactgaagtagggaaacagaggtggaggaagcatgctttgtggattttctctcctttaccaaagagagctcaaaaatttctggctgcaagactgatatcagacagacatcaagaatgcagctatatctggcttccctcatggcataagtagcactcacagcaaaatgcatgcaaccagtcacttaaactcagatgcaaaaattaccaggctttgggggtagaggcaccactgttgaaatagacattaaatcaaactgatgagcttctggcacttttcagaaaggcagtaatatttggaaacattttttcctgttttttttaatcaaagcaattatttcactaaaaactgagaaatgaagggaaaatgccacctaaaaaaatcactatccacaactaatggtagaattttgtatatttcattccagtcttttctcctatttcctatttggcaattatacatgacagatgacccataagaaagcaagtcctgcatttcactctctctcctaaaaagactcttcaataaagcttttaaaacaaactaacaaaaaaatcctggtgctttacgacagacccaattttgcttacagattttccccaaatttaagattttgttattggttgtatacaattcaaaaatgaaggctgttaatgctgagttcatagtataaacaaagagaccagagattagaaaaaaatgtcagcacatttgattagtttcatcctcccacatgccaatgggtatgggatgtggaaagactgcaattccattcttaccatggtttgcctcgactatcaaggtgatccaatatggcaagagaaaaagactaatggtctcaaatttttaacaaaatggcatttccaatttttgtaaaatggttgtttagaacttaaaacatattttccaaagaagcagttacaagaagaggtacatatttccaacttactctgcaacatctatttaattcctgggtttaaacagaggtaacaaaggttttaaaagatgaggtaactatgacaattcatcgaaatgtgaagagaatattcatgcatatgttttttttcaatcttatcctttaacgtctagtttatttctgctttttaggatatataacattaatacagtactaaaggtatttaatttgtaaatatacataaattggacatacaagctgttaaagctctaactttatttaaacagagaagtttggacaccattagttgaaacaataacatcagcattactttcatttgctgccatactgatgacaagatctctttagaaaaacatgttccatgtttcagtggggacggccccaggaataaatctgccatggaaacatccagtatactgtgggtctctttcggagataaattgggtaataggagtttggaatcccaaaagggcagctctgagaggaagcagggtactccctttctccagggggtcctcgcatgcagcagagttctcaaacacctttagtttaggcccctcttaacctggtaagtggagcagaccttgtcctcatacatttttaaagggtttcagtcacacacttgctgaaatccatttgtggatttctgggaccatgatgccagagaagaggatgtgggctcagccataactaagaaggaactccgtagtaatgtccagatggggaagaggactcgagttctgagacttcaaagtgctgcccatttgtggcaaacacttcattgagaaatggcttctgtggatgcagtctaagcctggggtgcttattttaggcaactatggtatatacactcacttttatatacacatttctcatttgtcagatttcccacggtgaactggcaactcctctctgggtgaaatccaaacgtggtggaagacagattcctggttctgggccaggtcctgtcagtttctgatcattacctggttttctatttccaactccatttaggtgactgagtctccacacagagctcaggttgagctttagacacaaatctcatctggtcattcattatatgatttgtatcctccagtggcttctgcctttttgaaaagtccaaattacctactcttttctggtctcctattctgcaaattaaatcttcataagtgattatactttccacatatggaatggagggtggtagaaagctgtcatgtcggtctctcccattccgccactcctctgccttctgtgtgactgcatagggaaggacagtcaggatacccttctccccagcagagtagttggcccggtgttgaaaacttgacccaattaaaagctagtgagagagcaaggcctaaatatacccaggcctcaggatctagccatgggtaagtcactcctggacttatatgagctaatattattattatttaaactaatttgaagtccgtttctaaactttccactgaaataaacctagaactcagaccatattgaactaacctgcttatgataggtgtggaatctgtttataaggctttgaaaataactatgtttacatctttcaactgaacaggacataagtcgatggcatgattcatgatatccactctagcatatgtagcttgactccactgaatccactccccttcctctgatacgtcttctttaatacatcagtggcactatttacagcaaggatggtttcaatggaggttgctttaatattacatttcccttccttcaagagtctaatgccaactgtaacaggatttctcatcttttttcctatactcagagagcaaactgggccatttaaatcacccagttaatgtaccagttgctgttgaggagcagatggaggtctgcattagactccaccagaatctgtgctccagaaggcacagcctcaggaccagaggagctgagaacaccttgaggaccagacccttattcacaaaataaggagctgggtactaggcgaggaagttatttgactcagagcatcacggagtcaggtgaagaagacacctttgccccattccacaacactgctcctccaggacatcatgcagctcccacacaaggaacaacagccagatcctctggatgtcctataaattagttgaatcagaaactgagtaatatcagtgtgtcattataggtcatttagaaatagctttagtttcatagtaataataagctctgagctatatgacatattgctctaaactgtacagaaactcaactaacttgcagtcttttcttaggagtataacgtaggcttctggttaaatgtagcagattgactacacacttctcacctttcctttccaacaatgactaaaatgatagcaaataaaataaaaattaaagaaatagctaagggcaagagactaggagggaagatagcagaggagtgatttcaacaaattttggaaagacagaatagacagaatgatgcccaatttaacttcctcaactctgcgatagcctaaagaacctacggaggagataccaagaaaaataatttactctcatagaaacccagagaggctcaggtttggagagactgtataccacaaaaaacaggagtgagacatgaggctggaaactttagaaactagttgtaagtttatttagagagagattggacctccaggtctctgccttaacccttcacacatacaggactactgtctctcaccttgaccaccttccctaaagaacagagaactctgtgatatgaagaccacagacctcagttactacaggctttgactgaaatcaaaaaaggtattacatgaaagcatgtaatctgagccaggggtctccactgttcctttccttctccaaagtttcattctgccaaatgttggaagccaggccaacatctccaaagtagactagacaagtcttctctggaaaaactgcaaagacattcagattgacaaacacttggctccaaagcccacctgttggctaatccagctattcccatagagcttcaaatcagattttttacattcttttaggaaaaaaacaggtggccatatattcaaggaactaatccagcagaatagagaacgaccaaatcaaacaacagtataaaatgaacaccctccttctcataaaccacactgtttttcattgcttctaactccttactggtgctaacctaatcccacatcataggccatctttggcagtagaccaatactgcaaggtatacccagattcattagaaatattctggacttaagcaagatattaaattctttcagaataccatttgagttcatgtgtgtcaggagagtaatagctaggctgaaagactaaacttggagaaaaagccttcagtgatatgttacaaggcattcattctagtatattcacatcattggtaagtatgtcaatggtataattctcaaacttctggatgacaccactttaggaggaggaacagccaatatagaagctgagagaaccagaaccccatccaaagagaatctgaagagattcagataataaaggacaaaattaactggaaaaaaaattaagtcttacattcacatttaaaaacaactacgcaaaacagagatatgaattagtaagagttaattattagttttttttttaatccctcaagaatctgggtttcctatacattcagtgactcatcaatgaagcagctgcccaaaaaactaatgccttcttagacaacagcaggagaggcagagtgcccagggcattgcacttcaagagggttatgaacaaggaacatgaccacacgggggtaaccagatggacacagttcaagaccatgcaccacagagaaatgtgcttcccatctcgggtacttcagagagccattcccttccatctcaccaaaaggaacaaaaaactgtgtactgtggaaatcgagaaagcaaagccgtgactttaccaaaagtaacaggagtcagtcaggcaagacccggacaagctgggtgataggagccagtggtggtgagagtttcctctcctcagtgagagcgagatcatcaggcaaatgcaattcacaatgagatatcatggagggaaagtctgtttctcttgaactacttactttaaaaagtttaaaccaaaatatccaatgtagtggtctaatgaattctgaaatgaacaactatgctttctgcctattatcttacaatcaacatttttagctttttagcccaggtctaaaaatggctgttaccaagcatgtgtttttgttttttttgttttgttttggtttttaatggaatggtatcatgtactggcatgatctagaagtagctacatcagccctcttctggtaatgaatcatcagcacatataaatggaaggtaaagacaagattattttattaaaagaaacaattactaactcacagggcaacaaagcttcggcagctataggatactacttgtgagtatcctatactcctatactccaggtctctgccttaacccttcacacgtacaggactactgtctctcaccttgaccacattccctaaaagaacagagaactctgtagtatgaataccacagacctcagttactacaggctttgactgaaagaataaaaggtattaaatgaaagcacataatctgagccatgggcctccactgttcctttccttctccaaagtttcattctgccaaatgttggaagccaggccaaaccttggtttctggaaaacaattcaaaggcgctggccatgcctagtgtgtttatccttctttctgtttaaaaccggtcactggctcaattgcctcctgaacgaagttagcaactcccagccaggagctcaggccttgaggacgggctcatggctctgggacacacctctcaggactgccctccgtttgcccaatgctctagccaagcaacaacatggcagttcttagcacacctagcatttccttctctctttccttgcttcagctctgctaacacccttcctctgcttctgccacccatccaacacccggcttgagccagattcaaattttgttcatggagccatgcaatggattggaacatcaatatagttcaatacccaccaacagtaaacagatgacaggatccattctacactgcaggcaaagtcaacacacacaaatctggttaagatgtgtctttggatagcatacatggaaatatcaaaattatctaaatctacataattgattctaatagatctggcttctctaataaatttgtaaatgggaacatgcctctctcacccccaaatagcatatgtaatgtggatgtaattgttggcctcagctaatgatatatttttaacaacacaaggaatgatcatccatatttttatgaaatgtagatctgtaaaataaatacagttaaataatctacaagtaggtttacaacttaaagcctacagggacaaatatattttgatcttccaatagctaacactttgagcaaatggaggaaatactccaaattatgtaatactctatataatctctagagttagaatgagaatgtgtttaacatgtgctctgaagttaagcctatacattatgaaactttagacgttccagctttaaaaataaaaaataacagctttaaataacatttctaaatacaacatttggttactaggagtctctcatgattgaaatttacttagcctgaaagatgaaatgtcaaactccaaatggaaggaaacaaaattagtgcaagtctgtatctactcttccactagaaaaatggtttcactaagtgagtttactgatttccactcttggaggctagaagtaaagatagctaaacaataggaagaggtgcttccctaaagtaattaagaaaacaatgtttcactttactactatcctccaagcaccagatctatatatttgtataagcacagcactacccaaatatatataaaatgaaaatccactataacaaatttgtcaaataaaatctgagcttctccactgttgttcaggcagcaatactgcccacaagtatgagaaacttaatattgattagccattgtgggttaaaaattccacagaagtgccatattaaatcattcgggtagcttttgcttctggaaagcacattccagcactttgggaggctgaggcaggcagatcacctgaggtcaggagtttgagaccagcccgaccaatatgatgaaaccccgtctctgctaaaaataaaattagccgggcgtggtggcatgtgcctgtaatcccagctattcaccaggaggccgaggcaggagaacggcttgaaccagggaggcagaagttgcagtaagccaagatcgcaccactgcattccagcctaggcaacgagagaaactccatctcaaaaaaaaaaaaaaaaaagtaatacttttttcccactaaggttcaacccaaccttgagggacaaaccaaagaaatatcttatgtcctctctcttgtgttctccaagtcatctgtttttttttaacccaatgaaatattttaaatatctccacaagccataaacaacctaactggtcagggaaaaaggtaagcaaagtagaatttagtccttgccacaaccaagccttatgtccttgaagcaaccaaggacataaggccaagaagaggtatgccaccaggataatagcaggtttggaatccactgtgagaaacaaaactcctggtgattaattttgaaactgtgctaccaccctgtaaccttcctagagaatataaggcttctcagtttcagcttctcagtttcagtaataaatgtctgacaaagcctcatacttttattttctccgtttttcatcccttccccacaaatgatggaaaatccaaaggaatcctagccataaagaactcatactgtgacaatttaaaacccattcaatcacagcaactgccactttgaaaggaaaaaagtcaccaggagtaggggccaacaatgtaatcaacatctaatgggatcagaaagtgtatggaagtctgggcttctcatgacactgaggccaaggagaacagtattacttcagaggtttcagaaaaagatcttgttataaaggcttttgagataaggtccctgccaaaaatatttcccgaggggaagatggggaacaaaaaagaataaactcttggtagaaaagagagacatttagatttagttataaaagatggcttactagcagagaatttgataaaccatggaaggacaagagcctgtagccagaatttcaggactccaaaacaagtcacattctagacattttagggttctggaggcagttaaaacatgtttccacttgcttgtggaataatctctaatcagaggttcaatacaatgagatccctacccactgaaatatttactttttaaattgataagctgaaaagttcatcttttttaaagcaatttctcgtgaagtctcatcttgatttagaggaagagggaagtaaaggggaaaagcctaccccacagaaagaggggaagtgacgttacattgtgaaacttaagggaggaatttcagccacggctctagggcgaggggttgtgtaggagagaaggaatggcttaatttttaggaaaacaggaaagccaagtgactactttggtgaatgctggaggaatggaaagcagcagcgaatcctattttggatacagaggctgagagccaagtaaatgaatcccaggcggagatactgtcttttgtctccagctgtcagcttttttcttgaaaactgtctcatcactttctgtgattgtggttaggaaaaaatcctactttatcttgtgaactttttattgtcttcctgaagttatgtgttacttctgtaaagcactctactctccttgtttaatcatcacaacagggaaggggagaggcttgcaatgcagtgtttccaaatccaatcactggagtcattcacataacattaggtttaggacctgagaaatagattctgaggtcacagaccagccccctttatatttaagcaggaggcaaaaactgaagctaggagagatccggagtcttggcaaggctctctgcgacttccagaggctttcttcactcagtccactgttcggtccatttcagagtctgctctttcacctttgtcctcaaatggtttatgacaaaggaaggtgctggacactggaaaggtaacgtcttaagacatgacccctgccctggagtagtttacacatatggaggaaggtagggcgtatacttgaaaacataagtgataatatgattagcaaaaaatcctacaggaatccagaagtgggggtttcatcaaggggcaactgacaaaagctttgtgaaggcaggtgcattcagtggaaagagtagacaactaaggtaaagaccatgttaagaaagggagggagatgggagaactatagcacccccagcacacaaaggtagaccttggaatgatggctcatgatacatttaagtcaacagaaaactaagtgaagagtaaagagaacaaagcaggaaaactacagaatgctttcaatggcaagctaaggaattgagactattttctagatagttactaaagatttctactggtagaaatttcttcacatggaagttttagtagaaataaaagtggtatatacaaggcagcgtcttaaggatcactctggaaatacagtacaaggtggactgaagaagggctggaggcagggaaactgagaggagactcagcagtttaggaatgaggtgatggggaccggtccacagagggacagatggatgtaacaaaggacgtcctaaaggaaaagtaaatgggatttggccatctactggatgtggagcaatcaaggctctcaatcttcaagtagagatgtatgggagaatggtgtcaccataaccagagggagggatgatagacggcagcaggggagtgtatggtcacctatgaagatatatccaacagccatttacaagtcagatgctgaactaaagccctggaaagccatcaggaagcacagtgttgagagtcgcccaaaaccaagagcctaaccttgagggtgaatgagatatccaaggagtcccagatctcagcctggggcacacttcatagttagggggctggaagaagcagaagtcagggaagggggcagagaaggaaaagcctcaaaaggaagctaagaataaagaaagcatatatcctggttactccaggctgacgtgggaggattacttgagcccaagagttccaggttacagtgagctataattgtgccactgcactccagcctgggtgtcaagagtgagaccttgtatctatttaaaaaaaaaaaaaaaaaaaagatcacacataaaagaaaggcaggagggagctttacaactcagtagtacagtattaaatgcccaaggaatcaaagtaacagaacacagaaaaacacactggatggggttattagatcatgggcatcaaagcaggtactatgctcagttttatgttactgtcacttcattgcctcagtaaatataaaaataaattttatatctgagtaaagtcgatacaggatgagcatcccaactttgaaaatccaaatccaaaatccaaaacacctctggccccaggcattttagataaggaattctcaacctgtatatgaagagtatatgaaattggctgcttcccaaatttccctagtgttgaaaccccggttgaccctctaaatgccaagagacatagttcaagtctggttcgtccaacatattcaccaagaagggtcttgaatagcaaagctatttccaccttcctatcccatgttaacggtagggttttgatataagattcccctcagcagaaacaggacagaacaatgttccctggttctcagtgcacatgctgcatgtgctctcattctctctctcttctttttttttttttgagatggagtctcactgtgtcacccaggctagagtgcagcggcatgatctcagctcactgcagcctctgctcattgctgcctccgcctcctgggttcaagtgattttcctgcctcagcctcccgagtagctgggattacaggtgtgcatcaccatgcctggctaatttttgtatttttagtagagatggggtttcaccatgttggtcaggctggtctcgaactcctgacctcgtgatctgcctgcctcggcctcccaaagtgctgggattacaggcgtgagccaccgcacccagctctctctctctctctctctctaaacaattgattggacaccacactgtctgtggatccagaaacagaagggtgagctgatatggaagaaaacagagtccctgttgtttactctataaaaaccattctccttgaaagatgccaatcacaacagtatcaagatctgctcagaaccaaataaaacacagaaagctcagggggtcagcagagggatgaggacagtgagacttaccaactttactgagatgaagtcagaagaaaaacaattccttatatctctgcattgtgcaagctacatgctactcactgttttccttcacagctttctgtggagacaagatttccttttacgtctgccaaacatatgccctgtacctatgttgtgatcccattcattccagcctctgctcagctgctgttccattagttaatattttctcttctgtgcctcttctctcctttcctcttggctcaccccccaaaaataagcaggtaaatctggctgtctctgtatatctgtgtgtttggggtgtataaaactccacctgccactgttgggtttcagggcagagagcagagctagtcagagcagcatgcttcatctccctttcaaacctgctcacccaggaccagggcaggacaaatgtatcagacagacgaagttggccttcaggcccccttatccactgctccttactctggtatcaccctctacccccacgcctttggttttaccatctacttaactaattctctgtgactctaagatttgccatgttaatagcctcttcagactccaatgcacagtttccaagaagccaaaaaagtggcggagggaaataagaaatataatgcagtatttcaggaaccaccaccaaataagaagaaacatctgaaaggaaaaaaaacttccttggcatgctgaaacccaaatggaaaagactgtctccccataaggccagctttgcttcccatagtgtctgaggtgtactgcaaacagcaggagttgaagatggtcagtgaagacccaccaatgacataagtcacacagggcactctgtcattatctcagggaaggggaggccaaccattatgtctgaggacagagtcaccaaggagcatcttccttaggattctcactctgtaaagcaaagataatgagaacaagtgactgctcaaacgtccaacgtgggaaaactggaagattgtttagtccaacctcctcagtttacacaagaagaaaaggagatgtaggaaaaacttgctcaaaggtcacgtaacatgacgcaggcagagctggggttagaacctctgtttcttgagtcatcatcccagtgcagcctgctcccacagcacgctgcctcccaacatctgttccttcacagagacatgtgcctttataaataattgtttttaaaaagttactcaggttaccagaccttttctgtgatcctgtgttcttgttattggaatcctaacatcaatcacaaaattatgtcacacgcttcctgaggagtgcatggaactgtttgtgtaagtggtgtggggaattcagatcaaatattcagggactcaaaactgaagacaaagacggccaatgctggaaaacgcatgtggctttttctaaggggctgagttccaagcatgtgtaattccactccctctacttcctacattctgatgactggaaatcttggggtcagtccaaggtcgacctacacaaagggaactccctaggatagccttagaaaaacacagcccctgcaacaggtaaatttagggtacatcattccaataaactgtcttgcctgacaaggttctctgtaacaggtcacacaaaggatttataccttttccttactgacttaagaggtagagaatttatccagaggggtttcttaaggtcctattttaacaatacaatcaaaagtgttctatttggcctcacttttccacacatcgtaactgttcacaggaaaataaagtcacccagtcttctggcttacaaacctcaggcaaattctacttctcacaccaccacctttgcaaatgccatatgtactaactgtattgtaagaaatatttacatcaatctggccaagccaaaaggtattttcttccataactttaattagcactgtctgcgtttttttaagttggtattgcctacatttgatttcaactgttagaattcatgtttccatttctcccattcatttgtgcttggaaaaggaataccaccataatgtgtactatgataaactttaagatacagacagcttttctgatagttggaaatctcttgcagtgtgatctctatagccagggtgacaaacacgggactaaggggcctggcaggtaactaaatgattcaggagggcagcagtaagttcacatatagatctggactgagggataggggctgtggcctcgtggagaaggtacaacccttcaaagcttctcatacttaccccattaccacagtgaggaagactgttctagttttgccagatcttctgacttctcaaaaaaggcgataaattcagagtttggggaagtctcagtttttaaaaatgttaactcaagttcaaaacaaaacaaaatactgagcccaaacatgcctatgggctgctgtacttggctgctgagtttccagtttgctatctctcctctataggaagtgggaatgatgcatattcaacgacgcctacaaaaattacttcagattgttagtctcagaaacccactggtggcctgaggggacatgcaaaaagaagaggaacaggagcagagatggcaaattattaaggtttcaagaccttaaaagagacaatcaaagtattcagattctcagtaaaattaccagattaaatcaaataaaaccccaccctttttccacaaaaatcaacagagagtcctgctttcttttcaccacaaccctattcctccatttatccctgacgtcctgccaacacctaaccagtggctagatcctgtttacttcttagtggaattatcttgatcaagcatgtcggcccttcattcccatcccattatcttagtgtagagcctccccattgcctagaccacaagggtccccagcccccgggcccacagatctggtacgaggccgcaaagcaggaggtgagtggtgggtgggcgagtgagagaagcttcatctgtatttacagctgctccccatcactcactaactgagctctgccttccatcagatcagtggtggcattgcattagatcttcattagagcatgaactctattgtaaactgagcacgtgagggatctaggttgcaagctccctgtgagaatctaatgccttatgatctgtcgctgtctgccatcacccccagatgggacagtctagttgcaggaaaacaagctcaggattcccattgattctgtattacagtgagttgtgtaattatttcattatatattacaatgtaataataatagaaataaagggcacaataaatgtaatgcacttgaatcatcctgaaacaatcccctacccactccaccacccaggtccatggaaaaattgtcttccaggaaactggtccctggtgccaaaagattagggactgctggtctagaccactgtagttgctatggcacccccagactccagtttctatctcctcccacctcactccaaacctagtccatactataacacaacaaccaaaatgatttttcttaaatgtatatgtcataacctctctgcaaatatgcaggaaactgctaagagcatttgcttcttgcaagggaactggcgaacatggagagtgggttcaagaaagccttattttcccctgcatgcccttctgtacttcttgaatttttattatgtgagaattaatttctcaaaaatgtaattttaaaatatgtaataccccagggcttctagattaagaagcaagacatctccctaccccaacccactggggcacataaatggactaaagattcgtataggtcagatgagagcatactgagaagtaaaccacagcagagcttgggacacatgcaggtggaaggcaagaatggaggtggaagttggcagcatctgagattagacgtacagaaactgaaaggagggtacatctgcaaaactgcctgcaggatggtagcttagcatggcctccttttcaccagcctatcagggtggtggcacggttggcccctagtctgaagtcaaacatctacctactctccaaagggagcaagtgatctgccaggagggacttgcagaccctggtggggatctctcctctggcattgtgggaacctctccccatcctgcttgcttcaccttgacacaccctaaagtgaaacctgctctttgacatactatgccctcaatttcagagctcacaacccatactcctagtgaaagaaaaggccaacaggggcagcagatgagcacaaggaggagggaagctaagtcagctgctacacatccttcaggcatccatatggataggtaagcaaggatgactacatatgaagaaagctggggaaaaaagataaatacggaaaaaatgaaaccgatcccagagaagacagagatcataactcatggagctaaagcagaagagaattttagggggaaaaacatctgagtgtggtcaaagatattagaaaacacaaaatacatatataaaacaaaaacatccatatagaaaagattgcatattgaagttaaaaattcattagaaaggatgaaatgataaaagaatgatgaaatccccagaaaactgggtgagtggaaggaggaaaacaaaaaagtttggtaggacaatttaagagtaaatccaggaagcctaacatcaatctactgaacccaagtcttcagattggaagagcccacaggtgctgagcagaataaaggaaaaaagattctcataaaatgtcacaatatcttgataatgagaaaacagagtctccaaagaaaggtccatcaaaggtacgagggtcagtagcattgattggtagagagaaattctttcaaatgctaagggaagattattttaaactcagaatttcatatccagccaaattaccaattaagcatgaggacggataagcagaggctcaaagtatacttgccatgtactgtttctgaaaacttactttataatatactccaggaaaattaaaaatatgtctaagaaaaaggaaaatagagtccaagaaaagtagaattaagccaagaataaaaggaaaataaatgtcagctgttcagcaagtcctgaaagcagttagttcataacgcattcaaaaagtttgtataatcaagaaaataaattatagttttgagagaatgaagacaaatattacttctgtaaatgagaaaacaggcaattacaaagtccagtaagaacaaggctatataagaacatcacagcccatacgtaaagcaaacaaaagtatgccatgatcctaagccactaaccaaatgtaaagagaatttgacctagatgcccagaacacctctgttcaagtggcctatgcttggttaataacctaggattccatctttatggtgcatttatatttttgataccactttgagggagtggtattggagcctctggatccaaccaacaaaagcaaaccatctccttggattttcccaatctaagagtgtgaaagacactgttagttccctgagtaaacctccatttccaacccttctcccttgcctgcctctaagatgtaccttaaaaacataagagtgggctgggcaatcccagcactttgggaggccgaggtgggtggatcacctgaggtcaggagtttgagaccagcctgaccaacatggtgaaaccccgtctctactaaaaatacaaaaattagctgggcgtggtggcagatgcctgtaatcccagctactcaggaggctgaggcagaaaaatcgattaaacccaggaggtggaggttgcagtgagccgagattgcaccactgcactccaccctaggtgacaagagcaaaactccatctcaaaacaaacaaacaaacaaaaataagagctattattcccccaccccttttgcaatctgatcacagtgagagccgacatgtgagccaaagtcctcgaggaggtttcctttataaataaaaaggccaagtcttgctaagaagaaagttttgcaatttttccttccctgtttttcctatgaaagccacatattaagaatgattggacagaagggtaaaaggtccaaaatgaattccatgagtgcctgtagcagcctttgggatcagaaaactaacccccatatctacttaagacttcggttgcatatttttttgttgttgatggggaacacattccttaactgaaacaaggaattggtttcctattctgaatgaagcccagtttgatttgggtttctgtcatctgcaagtgagaaagatctaactaatatatatctccttctttacactctgctccagaggagaaatattaatagcctgtcaaagaccaaatcttttaccttcagccttaggaggaatatgctgggtaggtttcccacagagctttcacttaaatatttacgtggccccaaccacaggctaatccctgtggttacgtgggacactaggctaaacaagccaccacatttgccctcctggaccccagtaaaacaagggcagagagtttacaaatgcataaaatgctgcttggagtgtaggactacgttatgcaagcacagcaaagggagtaatttagatccatctggtagtatttccaaacctagcaaatcctaaaatccaaaagcgcttatttgatctgattcagccacatcaacatttttatccaccaacaaactcttattcactgaacaatggcacagatgagccaaaataatatttgctttgaatgcatttatattttaaattgggtgtgtcccttgttccgagaattcaccacaccccaaacaaattgaatccaaatggaaggttctaattcagaagaaaccagcacatagtttagctgcaccaaccctatctctttagtagagtgattcctggttctgtttctatccaagaggagaggtaggtaacaccactactctaactgaattgaagcctatcctcatcccagcactgcttatttcattcattgaacaatattaaatgagtatctactatatcagatactctgccaggtgttgtggatatgccagaaaaaagaaaatacctgccctcaaagggcttatgtctactggggccagcaggcataagtagagggttcagacaggaaagagtcaccaagctattacaacatattatactgagttttagaaaaaataaaacatagctggagtggattctctaaacagagggaacagtgtatgcaaaggtctagaagcaagataaaacatggcatattcaagaaacgtcaagttcaataaacttgcctacctatatattaggtagacagctgtagcatttacttgaaatgtgtatgtttgatgaggaatataatgagtccacttctggacatgttgaccttgggaagcctgagagacatccaaacttaagagctatctggccgctgcagacactgctacctacctgccaacctgatacagatacttggcatagcctcaaatctgagaagagtcactgtggccttcaaacctgggttaatgccaatttttgctttatttccacaccatatcagatttttgcttactctgcagaaagtgctagtaaagcaaaacccataaaccattctgagggccagattaaaactctccttgagttctccaaggtgactaatttcaattcttatctttataggaaaagaatctggcaggaggtctggatggttactaatcagttatcacccttccattacatctcgttgcaccaagtggttgtcacaaatttgtctccttttgtgttttcccctctaacttatcagtgaagattagcagaagtttgtggtattgaaatttgtaggcaactgaggatttctggggctaagcgtgttcatttttaaggtccatgggcttttggcatatactccaggtaccacttctggtcatcctggcccagtctggtgtgtgggtccagagttcaggctggtgacagatttgggcatcattactaaggttgtcatgaggctgtgcaaacctctagagagtacaaggaaatcaggagagagaggtcaaagggagaactccaaggaacccaggaataatggggcagacggagcaacaggagacaggaaggaaaaactaagaggacagaaggactccaggcaatgaaagccaaggtgaagaagagggagcaatcattcaacagaatctgatcaggaacagagagtttaagtgagaaagagactgagaagcctattaaataaggggtctttgttgaccttggagagagaagtgggttgagaagggaaagaaaactgaggactcagacaagaggtacagaaaacccttcagaaaggctggcaataaataagctacggataagaggaagaaagcagtagctagggccgcgagtgcacaaatggatatgcatgggggtgtgggtgctgggatgtgggtgtgtgaaagaagagttttaaatacatttaaaggctgttgggaaaacgtcattaaagagggaaagcctggagactatggaggagaagtgataatcaataccacatgttcccgagggaggggaaagcgttctatctagagcacaggtatagaaaccaaacctcttccattacgggagggaggacagatggatagatggtagcagtgcagaaacttgcaggtctggtgacaagctgaggaagccacaactcaatggctctccataaagcaggaggccagagcatctgctaaaattgagagaagtgagcagaattgagagaagttgaatgagggtagagaagataccaaataaacattgtgaatgagagagagcttcccaaggcagtttttcagtgagcacattgcaaggggtcctgaaatcaatactttttaaagaaaggaattaaaaaaccaaagtacaatgcttataggaaagacaaacattgtatataataacattaatataacatgtgcttatgtgtatactgaattgtgatgtaaaaatgttctttctgtgggtggcactcaacatatttgaatgccaacagactagaacaaataaatcacttataacagggggtccccaacccctggtctatggaccagactggtactggtctatggcctgttaggaaccagagcacacagcaggaggtgagctgcagtcagccagcattaacgcctgggctccgcctcctgtcagattaaccacagtattagattctcataggagggggaaccctattgtaaactgcactgcaaggaatctaggttgcatgctccttatgagaatctaatgccagatgatctgaggtagaacagtttcatcccaataccatccgccacccctgccactgtctgtggaaaaattgtcttctgcgaaagcagtccctgccaaaaaggttgggggtcactcacttaggagaactgaggtgagggtggaaatgattttagtttgtggtggcagtaaccatcattatggcttatgctttacacctaccctaagttagaagaggtaattaagtttaaatgctcctgttaaatgctgtgactcaagaagaacacataaaatatataaagtaatatatcttatcacttactttacttaattatgctaattaaatcttttaaagtaattttacagtaaattaacaggctatacaagaacaaggtctgtactactccgaccacataattatgctttttgctatccattaaaattcttacatcaaaagctctttaagtgatctatttaacttgtagatgtgtgtaaaaatgttaaaaggtgttttattttaaacccacccatatttttataatttacaacagcaaaatgcaagacaaaaaacacataaccctattattgttaaatactctctcataactgaaggcaaatcccttctcttagaaaggtacttctccaacttctacaggaaccaaagtgactccattagagaggaatgcatttatttgccattctcagtcatttgtgagatgccccattgttacagatgaatcccaattcaaacagtcaaaaaatgaacattgccatattcctcattttgccaaataccaattattattcagagaccaagataatccctcaaagtcattcagccctaaattctaatcccataaatctgctttatgggttagaagaaagcctttgaaaatacagtaagtcaggtaatagagtctaccacacccctaagtcatttaacagacccattatcatttactaaagaaaaaaaaattaattggaaagtattttgctcttaatgtgcttcagaaattatttgcaaatatagctgtgaagtctactttgtttatttccagtaattaaatttggttgcagcagagtgcggccaggagaagcacgtggccattatttttccctttagggtgattcgaactcctagaacatgttaacccatttatgcctagtgttccattattggaacactaagcttgtgggagttatttatatactactgctcaaggtcatcgccaagatctgatttatcacacacacaaaaaatttgcaacctccagcataaatgggttaattttcatcataacaaaaatgaagctattttatatgtgtcacactgtactaggtaccacagaatgcaatatttttctcaggtaagtgtttatttcttaaaaaaagtcaagtcaaccaaaatgtacaaataagctcaaactacaaaatgactctagaaaagatgaacaaatttgttgattaacaaatattacctttccatgtggcctgcattcattataaattcaagagaatcaatgacattcaactctggaaaaaaaaaactccttaaacgcagaagttcatctaactcagcagtattcaactttttgttttcaggatccgtttacacccttaaattaccaaggaccctaaagagttcttgttatgtgggttatatccactgttatttatcatattcaaaattaacaaatttttaaaatacttttaaaaataatctttaaaaccacatattaacctagatactttttatgtatttttccaaaagaaaatttactaagaatggtattgatttgcgcttttgcaaatctcttcaatgtcctgcttaatggaaaatagtagagcttcatgcctgcttctgcatgcaatttgttgcaatacggtgtttaggttgaagtacataaagaaaaatctggcctcatacagataaacagttggaaaatgaagggtgtcttgcaatcatcttttgagatagctgtgggtattctttcgtactttccccaaattgaacaaatggtgctttttagtagttaattacaatatggaatatgaaatctgacaaactttctgtgctctgttccattaaaatccagtggtctatttgcgacttgaaagggtcttttacccatgtatgattttggaaaatactggttaactgagttatgtagcttttttttttgaaatgcctacacatttttttttagaaaatatcccccgaaaagtacattattaatattactatcaatcttaccatacacatcttcagtactgggaagctgtcaagcacagggttgcaaatatgagttttccaaaatttcagttttcactttcacctgacagctctaattttatcattggcagataccatcaggtgtttttcttgaagtaatagcctcatttctgggaaaatatcaaatggtttaagtgttcaaaaaaggattgttaggatatacctttgtgatgaattatgtggccaatataccgtttacaaataatatacagaaagttgtcgacttacgatggggtcacatcctgaacaacccatcctaagttcaaaatactgtaaatcaaatatgcatttaatacacctaacttgctaaacgtaatagcttggcctagcctactttaaacgtgctcaaaacacttgcactagcctacagttgggcaacatcatctaacacaaagcttattttatgcttaagtattgaatatctcatgttatttactgaatactgtattagaagtgaaaaacagaatagctaaatgggtactcaaaatacgatttctactgtatttgctttagcactatcccatcataaatctgtaaaatgctcataatataatgttaactggaaaatacaaacaaaacatgtttatattactatggtatcagctgtgcttcaagaagtttgcccaccttttcctgaacttcttctgtattagacaaaatagccataaaaccaaacccaaaactcgtacccagagggcaggtatttatgcctttaggagaagaatttacaaatacagtcataaataccaaatattaacagttatgggaaaaactgacaaatattatcatatttaagttagatttacaattttttaagcattcagtttaactgacacaaacaaaaataaattaaatacacatcctatttgactacaatcaacatggaagaaatgaaacccagtcttttggcagacagggtataaagaagcatgaatttacaggttcttcctaaaagcactctccgtttgagatgctgacagaatgggctttgtccaaaattcaagacatttttgctaatcactttcttatattactaagtgtccacatgatgcagtattaactcctaaaagctattttcattaacatgactgcagtacacaaaaaactacattattaataaaaaaaattccaatagtctatgtgtctatctacccctctgataattaaaaattggagagaatgattaaccactcaccaattcaaaaaaagatattaactttttcatgaacgtcctaagagcttttttttaatttttatttttttttaagtacgaggtccatgcaaaacaaagggcctattctcccaaggttccccgaaacaaatgcatcctctaggatgtcctgcactttcaggctcctctctttagcacatgcctaagcatacaagctccacagattgctagcaaaagtaatgtcaatcccatgattctaggcatatcagtgtctgctttcaactatcacatttgctatcaggttgaaagaaaaaaaaacaagcgaaaccatccttggcttgggttttatgagaaacgttaccatttttctggtctaataattatttatatgtaagccacctctacttgactgcaaacctgttagggctgggcccaccttttatgcctttgtcttctcactgtctaccaccatggcttttaaaagatggtaccaaataccagcagttattgttcaccaagcacttatgtgcaaaacgtttatacatgtcaccttaattccccatcatgaccttaataggtagagagggttgtcctctttctatagaaataaagaggccaaagataaagtaactagtccccagttagcttctaagtaatgcaaatggcatccaaacacaggtttgggactaaacaagtgattctcaaactttgttgagcatcagagtcatctggagggcctattaaaggaaattcctgggccctgcaccctgattttctgattaaggagatctagaaatgggcttgataatttgcatttctaacaaggtctcaggtgatgctgatactgctggttcacggaccactgagaacaggtgctctaaccacattagcctcagcaatgtggaggtttcaacgtgttgaaaagacaatgatggctaacgaggccatcaaattcatacagagtaaaaaggatggaatcctgacacatttttcaaaattaaatttgagaaatgttttttcctacttgtatatttttctaccctaccatcctggcagagaaaggctgataagaaaccaaaagtcctcagtcctctaccttatagagagggaacgttcaagactggccctaataagcaggagagtgctgttgtctcttctaagacaatcaacagctcagtggcatctgctggagttagagaaggtagacagctttcaaacttgactagctatttggagaagattgcagctaaatctatgcgactgtgatggagaggacccttaatgggaatggaagccgaaggaagaaggaggaaatggaatctacaagaggagacatctactcagaacattaattctggatcagatattggctaccatgccaaaggatcatagctatgttactactgatttatcaatagtggccctgattcacttggacagctgaagagttcaatgtaacaaacttctgcctaggaagctgcaaaattggtaccattaaaacatggctctttcaaattgcttaaaactctcctactgaaatgtacacattttcagcaacatttcatttctcagagtaacatgactttcaaggacaaggcaaaaagactgcaataattttactgcaggaatctactctgaaaagtaaaagctataacacaagattgcagtaattttattgcagggaatccactcggaaaagtaaaagctgtaatatagctattacctacgggggttatctccaggagcatcttaattttcctgaaacgtttatggtgtggcagaaagcagctggactcttgcattccacacagatcaagacacaagcctcacacttcatcatggcaatagcaaaataactgaagggaataaaaaaggaaagaaggaaataaaaccagtggccttatatctaaagagaagaagaaaaaaagaaaaaaaaaaacacgtggtcagattggaaaccaaaccacctgattttgcctaagtcacgcatctcatctggttctttaattcctcattttacaacaatgttctgggaatgaaaagaggcactttgctctttagaaacaaaaattaagtgattccgaaagatatgatttttcagttgtaagactttgtgaggtaaatatccactaaaaactgcttcctaaagccagcacacttcgctgctgcaatgcttttttaatgcagtttgtccctgccaaaacttgcattgacgtttacatacaaagcattacacaatcttccaggagacttggtttctctatataaatacgaaaacggcatctgcctccctccccagtgatacaatgagcagagggccttagtcacgggtcaaacacctaaagtctggcctggtaattattagctcccagcttgaaaactagctcactgaacttaaaatcttttcttcctctcaaaggttagttaggatgctggccaactatcttccagaggtcttgtgggattaatgaaaaggttaaaatattaaggacttacactcaatgagagctattctcatccatctcagctattataaaagtaaacactcccccttacttccctgtgatactctagggggctgcaaaccacagcccatgggccaaattcacctgccatatgtttttgtagagcctacaaggtaaaaagaattttcccacttttaaatggttaaaaaaatcaaaagaagaatatcttatgatgtaaaaattatatgaaattcacatttcagtgtctgtaaataaagttgcactgggccaggcatggtggctcaggcctgtaatcccagcactttgggaagtcgaagtgggcagatcacctgaggttaggagtttgagaccagcctggccacatggtgaaaccccatctctactaaaaatacaaaaattagccaggtgtggtggcacatgcctgtagtcccagctacttgggaggctgcggcaggagaatcgcttaacttgggaggcggaagttgcagtgagccaagatcacgccactgctctctagcctggaggcagagcaagactgtctcaaaaaaaaaagttgcactggaacacagctatgtccattttgtttacatattgtctgtgacttttatcttaccatgggacagttgagtagtaatgtcagagaccataggacctgcaaagcttaaaatatttactaagtagcccttaacagaaaagttttgcctatccctgtgctctgggcccaagtctgctatgcctctgagtatcctgagacccttagagaattagccctgcaaacaggcagctgtactgagaagcaacattctgtttgttttatcccaacccaacctggtatctaacaaatgcttctccttctagttcaaagcaaggctatgacgtcacagaatgaaccccaacctcaatgtctgcactaagggaagggtagagcagctttctctatggggccacattttcagtaacttagtcccgtacttagaatcttatactccgccttctaataggtcttcacagcagctctagaaatctcaggcttcttttttaccactatattagggtacctttggttgaacgttcccaaaaccccttgagaaaatttaaggaaaatatgaacacacccccttttcatttgttgtaagtacaccggggtctctgggaactggagggctacacagaggaacttgagcatatctcttgatttttttcccttctccacgcacccaactccatcatgcttccctcactgcaggccaacccctctagttcatacgtcaccaggatttacacctcccctgcttcagagacagactaggagtagaatcataccccgtttccaaatgcccgggagacaggtcaaattcacacgtctaagtgtaacagtgtaaatggaatgcagggcaatccctagaaaatgagaagggagagatctgaatagacaataccttaaatatccactctgcctgccataatataggtagggaaaacaagccatttaaatttaggaagagagacagtaagtctccttccaaagacaaggctaataagaccctcacagtatggggcagtctcaggcatttgaatttcaactttcattaaaatcctaggtcttatgccaaatgctaggaaaaactgttgttctttttatagttcccctaaaaaataactatattattttggtcctggctggagtcaacctctaccttcaatctacatttcttttgtgcttgcttccccttcaccccttctacacacacacacacacacacacacaaaaccattatcaccagcaattctgaaaaaacctatacaggaaaaaattcagactagatattcactcccccaaagtgggactcttgtttacccagcaacgatcaatgatgccacttacaaacacattacacaaccccacagggcttcttacacatacagccagagtcagtccttgggagttggcagttcttgggaaattcccaatatctcacatagggctttatttgtatttatctgggagagggatgggcagaagatgggatagcactactcccttactttttttcttttgagatgaggtgtcgctctgtcacccagtctagaatgcagtgatggggagaactcctacgctcaactaatcctccagcctcagcctcagagtaactgggattataggcgtgagccaccacatcccagccacttccttacatttaaaggcacctcagcacttacaaagcttttttgcacaccttgttgtatacaaagtgatcttcaacatcccagcaagggaactacctccctccatatggacaaaaaaacaaaacaaaacaaaaaaaaaacctaacaaaaaaacctataaaagattaggtatcaggctcaagggaacacaatgggtcataaaatcagggatccaggtcacatttcaagcctagggtatttatggttttgtttcattttcttgttaaaataagagcctaagttactgaccagttagcatgtggcctcgggcaaataataaattgggtcagagaatcatgcacagacatgacttggccaacagttggctaattatgacaatttagcaatgattgcattattaaactatttcagcagaacaggtttcacactcccctgtatcccagggcacgttctctgcagctctttccttcctatcgtccctgtagcaggccctcagtgctcaaccctctgctccctttctttaaaggctgccctggaaatcctcatcagctctcatagaggcaaccactggcacaccaaaagtgacttcccaagagactcttgggtctggcaattcactcctctgctactattaacccaaatgtaattatgtttaaattttatcccctcacccctagaactcatcttctcttcagtgaggtatgttgtaaaaccttcacgtttatataaaatccacccatcagtgttcatatacattatctcatcttcacggtaactctgggaagtaaagagggcagcactatcattcccatttaataggtgaagcatgccactcaacctctgagcttattctgtcaggggcaacattcctcagccacctgatggccaaaccaaaatccagcaacatactgagatatgctacagcatgatgagccatgaaaacatgccaagtgaaagaagccattcacaaaaccatatcctgtacaatttccagaacaggcacatctacagtgacgaagcagataagggaggcaacgggaggcaggggtgactgctaatagcctttcttttgggagtaatgaaaatgttttaaacgtagtaatggttgcacagtcctgggaatatactaaaaaccacggaattgtataccttaaatggataagttgtatggtatatgaattacatttcaaagctattaaacctaacttctgtatttatatgtcttataaaaaaggtatgtctgctaaaacatgatcttaaattagaatgaaataaagtggaatggaagatggataaaaacccaaaccagctatatcttcaactcctttctgttcccttccttcaaaatgtctctctcacttagcaaattctgtcactattgtagccaacgaatcttctatcttaatccaggcctcaactctacaaacctgggttactgaaacaactcctccctgattaccacatctctagtctcttccctatcccaacaatcctaaagacgtccgaaactcttcttccacaaagcaccatcttcctataccacttccctgctaaaacattagtacctaactcagcatggaactgaggtccctcaagggtccaaatgaactctaccttttcccagttcattctagcggtctcacctagtcctctgtgactaacacacgtgcacagcaccaccactcctagaaatcctttcttctgcttacagaaaggcccttaggatgtaccactgtcatcaatttcccttgaacattccagaccataatgtttgtctacctaccattagtagtctgactcacttgatacttagacaacaagaaaaattttgtatcctgtctcccagtaagggtcaaaaggtagctaaggtagctagatgatacgacatcttctgtgccctgcccctccatccactaggcctaggatactgctatatacaaagcgtctctcaatttagtgaccattaaagaacatgagctcccagaaatttactatctaatttaacaccgcagaagctgctggcaaaacaaaaatttttttagtttgggaggtggatttctttaaaatcatcccttagtaaatctttggttacctgggaactagttttaacaagcatctagaatgtccaagcactgagtttaaggggaaaaacacattagctaaaacacaccaccttggaggagccaacagttttactcaatggtatcctgactggttagtgcaggacacacgacaggaatattaacggtgactgatgttatctataaaagctaggcttttttttcttaaaggtgagaatgcagtagagaagcaaaaggtatcaaaggaacaaaagaagaatggcagcaaaagttagaaactaagaaggcagcagcacaaacagatgggtgggtgaatatttgatggagaagacagggatgaaggaaataaaagtcagaccagccttgcaacctggagggagacaaggcagaataattctctgcttaccaaacccatggaacaccagcaggcaagttccctccctggcgtcagggccccgcaatctctctccaggtggggactgggccttttgacttcaacagactctactgcagggaaccagaggccaatgaactctttttcaatgatacctttttcaatgataccttaactgataaagaatgcttatgtggctaaattcctgtctcttgaattaagctactgcaatgaggacacatcaaaaaaacacttccttcatatctctagaataatgtgggttttatctcccccaaggtgacaccaaaacaaatgattaaattgtggtagccttctaaatctgattaatgttattcagactctcccacaaactgtttgccattattacacttgctaattaggagctgtaaggtctttatcttccccaacctacagtcacatgctcaggatggagctttgctaaaagcaggactcctggttaatactgttaatgagtttagcactgccaaaatgtcaatagttttttatttggtcagaaagggcctaatttacctagttcagctgcccttggtaatgttcatggaaatgtcagagcagcaatcaggggaaacaaatggcaataaagatgattactagaagggtgacagcgaaaaccccactgacagactgcttttatttttctctcaccactgcaagatttcattcagagataaggcaacagagtacactgagttcagcacccaacataactgcatattttttctaaagtataattacatttctgcaattttgaaacggacataatacaagaagcttaactgtaaactttcccaaagaaggaagagagaataagaaaatgtttcagggaaagaggtgggaagagctgaactgtttaacattactttctttcatttacaacagggtgtaggatgctaaagaaaagggtacctacaggaggtagatctagatctaactcttttaccacttttggactaggaaaaatgtttatgacttattcgagacaaagattccttctttagcattttcaacttaacctttcttaggtggttaggaatgtaatagttctaagtcagtaatgaataatacggctgttcatctttaggtcatccacgccagggtgtccaaacatgggctatattcactaaagcgtgcaacagaatgtgggggaatgcccatgtacctgtgctgacttcggtggctggactaagcctttcactgatagaattccaaagtttactggggcacacatcaaattcattcaagtttttaggaaaaaagagaaccatacaaaataaagaaaaataaagcactcagcctagtccccaagggctaacgtcctttagaataaaaaacctaggtacccaagataacaatgtgtcgtcccctttgcacccactgcattccctacctaactccctgtatcccacacaatgggacacagaaatgcttcatgttttctgatgtgaggcccatttaacttttttagcatactagatgaagcaaagaataagataacttttccacttagaaagttgagaaacaaaaattccaatgccaaattccatgtgacctgagctatatccctaacttccatgcatgttaccttccaggtaattcatagatccgtgctttttaaatcaaagggcccacacactaccaacactggtgctaagaaaagcctttgacagaaagataactgcttcactttacctcttaaattgccctgcaaaaaatatatatatatacaaacaaaaagctgacataattcaatctctccttggggaaatttaacattttgctaagacaaggataaaaatatttgcttcatttttctatcaatttacctagattaagcatttaaccacgccattgattacagctgtatcactcaaaatgggacccttagtgagcaagtatgttcatgttaagacaatagcaggaaatatacttatctaagaggcctttgtttacatttctaagcacagaattgcaaggatataatgcagctgactcagctgcctgtggattcctatgcgcttaagaaatgtcttgcttttccttgactcagtttcccatcattaacaatggcacagtcatctcttctaccacctacctagaacactagattcacaaatggttgggtaaggattaagcattgtgtacacagtgaggatcccttggctcaagtctggaaccagaaaacagatgaaacccatagacaagaggcctacttataatgaagaaaaagaagaaggttccttatgatcagtcatccttactttagtaaagaatttcctagtgtgaaatttcaaagaaaacctgatatcaagatctgaaataaagggagtaaccatccaggattgccaggactagcatagtttttgcactgaaattcctgggcaaacagaaatagttggtgctatggtttgaatgtgttccccacattgggaatgtgtcctggggaaaacttaatccccagcacaatagtgttaagaggtggaaagttttaagaggtaattaggccataagggctctgcccttacaaatggattaatgacatttatcaggggagtaggttcctcagaaaaggatgagtctgtcccccattcccctcttgccatgtgatgctgtccatgatgttatgaagcagcaagaaggcccctgacagatgacagtccctcaatcttgaacatctcaacttctacaacaatgagccaaataaattcctattaataaattactcagtctgtggcattctgctctaggagcacaaaatgaactgagacagttgaccatccttaacagagactcaaacaagtaagaatatttgcataatcaaagataactgattaacttaaatatagttactttaaactcaattctctgcattaaaaattggagattgtttagctttagcttgtttatatattatctttttctggattttgcttgcaccaaaagggaaatgggtaaggtttaattatctgaggttttgccacttactgtgggagtccaggcaagttatttaacttctctgtctcaagttcctcatcatgtcaggcacacaggaagcactcaactatgagccacaattattatctctaatattgtaagtctagtggaatggccgtatttgttctgctggtgattttcaaataccactcatctgaataaatactatgaattttttcttttaatctcagaggagcctgcaagtataatcaggttgataggctctcctttaattcttctctctttccctgacagatctaaataaaaaaataagcaatttaatttccttcttcaatttaaaattgggctctactgtgctcattttagcataaccaagtgatagaaaattcttttaatgataaaatatcattatttctttctcagtaatttctaattatcaggatacacttgtccatgttaggatatgtttccgcttccaacagctaacctagaaacaggaataagctcatcagaattctagcaacaccagtaacaaaacataattaggttcttggaatttatgagcccattctttcaacaaaatacagtaattattcttttaaaaatgaatatgataatgcttggattgcaaggaaacgaattatgggacattactctgctatcgtatctggcaaggttccctttactttgctgtccttcagtcatttaaattttcaatggcaagcaaatataaccactgattatcacgtgggtaggcagcacagaatcacaaaaacgtaataatgttgactaaatagctgctgtttcttggggctgccagcaaccagagattgtagaaatgggacaagaaagagtttaaagaagttactgttacttattactatttcactattgtgaaaacattaatgaactaaggagagagaactattagttcaataatactagaaagaaaaataaaagaatatcttaatctgtatttatcagaacagtactgaggggctgaaggtgacaatgaacaaacttttggaatagaaagacaaaagcaaagtttcctccaaagcagaaaattcattcattaccagttacagaaggaatgccatgagtatgtgtcctttcccttttctaacaaaatattctaaagggggtcagaggtttcccacttgctcagggttttctaagaactgcccccagggaatgtactgtggatcagcaatgagatcttaggaaagttgatataaagctggaaatcagggattgtatacttcattctgagttatgcctacaacattgcagggtctttctcacttgggtctttgacttttttggtattgggttaagtatgacacagaaatctaataggacataaagtagcagacactcccagccactgaacatacatacaaacttgtaggggaagcaaaacatgagaaacaggatcaggccacattttaaagaatttagatgtgtgtgtgtagagactaaatgcaatacaactgttaggaaagaggggttaaagtaggtatggggtggtgccaaggagaatcagctgtactaaataagggtattttcctgattaattgtattaagcaaatgaatgcaattaacactaggcaaatggtcacaataataaagatcaggaatcttctcatccatattagacgggatgagaaaaaaaaaacagtgagcaatatcaagcctggataggttaaaaagcattatgctctgttcctgtctccttccttcatctcccaagtctgcccactatgttacacccctaattgcactcctaattatgggctcctctcaggatattatgtgtatgactgacattcagggaaagagagggcttcgcctctgcacagaaaaacgctggcttctccagcacatacaaacaggtaaacattgtatacccaacatgtgtatgaagcaggataggggacctccagaagctcatcaagagtgccacacaggggatttacttcagtcacgccatcagacagtaccacttcctgtgatagcttcaatgcttgtaacaatgtgtggtagcaattacagtggagcataaatcagatctgggtgttagaaacttcttggtcccttcttctaaatgatgtgttttagcaaaccaacttccccctaggaaagggggaaaccaatagggaagcatttgtactaaggtgagatcatttaattttgactaaagatacttttgttttgttttgtttgagatggagttttgttcttgttgcccaggctggagtgcagaggcacaatcttggctcactgcaaccactgcctcccgggttcaaatgattctcctgccacagcctcccgagtagctgggattacaggcgcatgccaccacacccggctaatttttgtattttttagtggagatggggtttcaccatgttggccaggctggtcttgaactcctgacctttagtggtccgaccgccttagtctcccaaagtgccaggattacaggtgtgagccaccacccccatcctaaagatattttgaaggttaacagaattgaggccagactagcattttggaagctatttcccatcattcaaagggacaagtttctattacaatcctttggtgggtctaatactgggtgggctatggaatcactaagtataaatgttttcatcatccaagttcccacaatcaactctttctattttcataaatactcatttctgaatgaatgttataccttatgcttgagaaaatgtttgcactgaatgacatttctggctaggaagccaggctctgacacctcctgcaccatgcctagattcccagcttggctttcagcatgccagtgaagtgggggcagagaaaaacaaggccagcttgcaaatgcttcactcacacagcttgtggccttccctttacttcctgaaagccacaaaaacctaagaccatcctagcaaccaaagcctccagccagtccatcgcgcgggtgggccactggattaatgagctccttaaaggaaaaaacaaaaacaccctgaagctacaagcagcccctcctccattgtgctacaaaaatagtaactctgactctaagagctaaattgattatatgacacagtttgccaaaccagtaggtaaaatgttgctctagattagcattttggtcagatacagtttaaacaaaaattaaacttttaacagtacacttgtagttagcaacacagttcaatttaggaacttctcagtaataattttgtcattatttataggaagtcaccattaaaatacagaaacactagcaatgcgtaattgtagcaattttgggccagaaaataaaattcagctacctctgtgattaaaaaggactccactaggccccagggattaagcttcctacattagattggttcacagactttgcaaaacagattaatactaggctcatgcagagacaggtatagcccgccctccatttccatggattctaccaaccatagatcaaaaatttcaggaaaaataagaatacaaataaagaaacaagacagtataacaactatttacatagcattcacactgtattagctattataagtaactagagatgatttaaagtatacaggaggatgcgcatagcttatatgcaaatactacacccttttatatatataaaggactttaacatctacagattttggtgtagcgggaggtcctggaaccaattccccttgaacaccaagggaggctgtatatgtaaaagagtcataggttattaaatgttcaagtgaaattccctttttacaaaacattctaaaattgatttcacttgttttgtttttttttttttttttttaagcaggccaaccccaactcccatcccatacccatggatgggctgtcaaaggccacaggtggcaagaatctcaaggccacagtggccacattgattctggccccaaagggtaaccagtgtgggaacagcacagcagcccatgctggctccccaagctgctgccttcctccttgccccacacgcctcccctgactccctccagacaccctggcagcactccttcaccattgtaaaggcattcttaaataagcaacaggctggagactgagtacgcaggcctgggtagaacaacagatggtcctaatttattatagctatgtgtttggtttttttaaactgaactttatagtctttggattattttacaaagaccaccctggggcatcaaggtacccttgttttttcttctttaacgtcagacaccaattctgcacaatacactgctcagtttcttcatttacactattttccctctctcctcccccactttccttcctttgatctgccctaaagatattagaaaacacaaagttatgtaggtgtgcttataacgaacacagattgaaaacctacatacttactcagtcgttaactgtatattatgatatataagatggactatcagagttattaaaaatcaagttgtttgttttttgagacagggtctggctctgttgcccaggctggagtacagtggtacaatctcggctcactggggcctcgactttccaggctcaagtgatcctcccacttcagcttcccgagtggctgggcctatgtgtactcgtcaccacacccaactaatttttcttcttattttttttttttttttgtagagatggtctcacggtgttaccgaggctggtctacactcctaggctcaagtgattccccccacctcaggcttccaaattgctggaattacaggtgtgagccattgcacctggccaaaaggaatcaagtttttaaaaagaagctatatcaaggaaaacttgaaaaaaatgcagaatatgattctttaaaactcaagtatgatccctttaaagaaatctttataactaaagacataccggccaggcatggtggctcacacctgtaatcccagcactttgggaggcctaggcaggcagatcacctgaggtcaggagttcaagaccagcctggccaacatggtgaaaccccatctctactaaaaaaaaacaaaaaacaaaaacacaaacaaaaaaaaaacagccagacatcatggcgggcacctgtaatcccagctactcgggaggctgaggcagcagaatcgcttgaacccaggaggcagaggttgcagtgagccgagattgtgccactgcactccagcctgggtgacagagtgagactccatctcaaaaaaaaaaaaaaattaccaaaatgttacctgatagtaaaatacaaaattttttgtttactcatttatttcccaagttttgtatgaatatgcactatttttatgatcatgcctgcatactccttactctttatcctgccctttctgtaaggagtccaaggtggaaatgctcatgtgatgtgaactaattaaatttttcttaaaaacaattttaaaaaccatgacttaaaaagcacggtctgctttagttataatggcagattctgaactatacacacatgtattatatatacataaaatgctagaagacagactatggtcctttcatctgcatttgagtacaaacagtaccaaatggttacttcataccactctttatttatgtggtatatgcgatattggcatctactgtggagagactggaataaactatatgtctacatcacccatcagccatctgcattgtgagtgaacagccatgaagaccaaagatgcccaaatcctgacctgtctctgagccttattatccaacagtctactgcacatttccacttagatgaccagcaggcatctcaaactcagaatgcccaaatctagactcatcattcctcacgaactggattttactaggagatctccagtctcacctatcagcagaatcccctcagaaacctgggtattattcccaatgcctgtccttccctgcaacctaccaagccatcttccagctccaacagccatgacaacatggtctgagaaaggagtagcattatgcaaacagcagggacttcaggaatcaaaccctaattgaaacctggccctgccatctaccagacctgtgaccttggacaagatccttaacctgtctgagcttctattctctcacatcaaatgcccctaaagacaggatctgtctcatgggaccatggcatactttaaatgaaggccattcactagaaagtgaatgctgagggtcaggcactattaggcactatgcaggtactagggtcaatggtgaataacagccattgtggtacgaaataccaagtcctcaggcctttacagtgtattaactgctacaatgcgaactacccaatgcaacggggaacacaggagaggagatggaacctagaccgggggtggcaacatcagaaacagttttccaaggtaactaacatttaaactaagtcctatatgatgagcaggaggtagacaagcaaagtttaaggatgtggatagtataccagtggaggaatagcaaatgtgaagttgtgaagtccagagacaaccaggcaccttgaaggtgctgaaatcagcggtgttggctggaggatagaatgtgagcgacgtggctggagatataggtggagtgatcaacagggtatatggggctgggtacctcgaaatgaagggtttctaggcagggaaatgaccaaacaaatgctttcaaagtgcttagcacagctgaatgctcttcttgaaacctttaataactgccttcattctcaccaccatatagtctggtttatgctgtccagaaatttacaaatcaagtgtctctttttgcaagctggccttttccaaatattaacatgttagagtatttttaaaaagcaattttaaaatttttctatgtcgttggtatattaaaggcaagaatataaagggaaaagcccatgagtctttagctggggtttttgatagtcagatgtgcaatgaaaaggttaacttcttttctgagtcataaacctcagaactctccacacaactgatctcagtaacttcccaattccaattgctgtgttaagtagcacttataagacactacatcagcctcatcatttcacgacatggtgtgctccagtttcccacccaacccacataagcaccaatgttcaatgctcagagtcacccgaagcattgcaggctgattgctttgatgaaaacttaattctaccactgaggaatattacagtgtcgtattgtgaatgaaattcacccagtaacccagacctcattggaataccttattaactctatatagtaatctatgaacactgacattaaaaaaaaattagtaaaatgaatttaaaactctttcatttctactggattaagaatcattcaccccagaaaagcaattaacatatttgtctcttgcaaatgaatatcggagcttaactgcatggacttcgtatctttgtaagaaaggatgtctttttgcatgtagaacacaattatagataaaattatcccccaagccccatcttctaatactattcatttttaatttggaaagaaaccttgataagtccagatgcattacgttaccattctcacaagctcttacgaatttttagaataatcagagtatcaatggacaatatacatttaacaatactaatttgtaacaggatgctttgaatatcagaattattactgtgcatcactaaacagttttgttgtattaaaggcaatatgttttaaaaagtatagatgtagcttttgaaatgcataaagggaatacttgcaaaatgaaattgaagtaattctgtaccatactgcttcactagaagtatttcaacaaaataatatggtattgccattcttcacatttatcatttcttaacacaatctgcaacaattccagctcctggagctactcccatcatcccaggactacaacttgcttccattcggcctccacactgatctcttctcttcctgagagaggacacccagagccaagttcagatactctcatgtaatctggctggaaacaaagctctccaaccccagttgtactgggtgggcccctggggctcagtgtttgccttcagaagtagatagaggcgagctgtagcccagatcctttttcatggaaagggaacctgggggtggtgggttccaggggctcacaccgctggttgatataaaagtagttgccctatgtgtaacttttctatctatctcctagtattattttacttattttcattattctttattatcatgtattctgtcaagcacactgcaacaatgtagggtatgttctgatacgaaagcatttctccagccaccagccactctcaccagcaaaggtgctgagacagagacataggtgaacacactgtattatagaattctaagtcgtaagtcagaggggtgaggagtgttgccagacttcatggggtacttggcactcaccaggagttgagaaaggccttccagagaaggtgacatgttgagtctagaagatgagttggtgtcaccagatggagaaacgtcatcacaggaagaaggggcagtatgagctttgttttgagagggcaggagggaggaggaggaagaatactgactacaagaagattttgtattgcacaagacctgtgattctccttttacctgttggatattcagaccaacctaggttggaggcaacagcttagaggtggcagtcaaagccatgggaatggaaaccaccaccataagagagtccatggagatgacccagccatggaagtccaaggggtccaaagctccacaaccaagtgggaggtggaagagcctagggcttaggtttagggcttcttcagttcccttcccattgccctcatggtatatgctggtcagcaaatgaccaaactgcttaacaacttcaaaacactggcaggaatattctaccacttcctccttttgaccattagccaaaacctcaataaagtatcagaggctttaaaaaacttcttgcaaataaaaaaggtagctataaatgaaacacgtggccttcgttgctatgggggatattccaaatcctctcaaacctccagccatcattgctgcttcaaagcaatgctctcaccagtgcttctgtaaccttcttccagttaaccaattgcaactcgtacagtaattcacaaagtgtgcatcactgataaaacttctacagtaattcacaaagtgtgcatcactgataaaatctttacagtaattcacaaagtgtgcatcactgataaaaccttatctccaggaaagaatggtcatgcaccacatgaacacggtctgtttctctgcagtgcatccttattctggacacaggcagtgaccacaatgccacctctctcccatgacctcaatcatgatggtcatccaaaggttactgggcacaagagggattgaaaacaataaacctgggacaaaattagggcaaaagtcataaaaatttaaaaggaattagtattgccacttgttagcttattaacattctggctctgtgaatccagaaaagaaaatacccagtattctgacttgacactatttggataaacattttcccaggcaatgagcttttggcattaaggtagagaaagaaaaaaacaacagcaggcagtgagactctcagcattcctgcatattgttttcatgacatattggtctacacttaagaacttctcttaaattatttgagtgctcacaaatatagctactaatgcttctaaggcacttctactctacttggcatcttcagcaagtaggccctatagtagcaaaatataataataatatagcagcaagaactggcaattactatgtatttactaggcactgtgataatcactatatgggttatgtcactggccttcacaacatttatctagggaaaatacttttattatcactactttataacagggaatgtgcagcccagaaaagcaaccttccccgcatcacctagctaggaagtggcagggctatgatttcagagtctataactttagaaaaaaaatagttttacagacaaagaaactgaagtgacttgacccagtgaagttagcagagaaggtgccaaaaaacagaggcctttcctagtcattcaacttagtatcctgaccccaatatgtcatcactgctagctggggatgttttaatgccaaataaagaagacgctccatctttgacactcagggaattaaagggtttgaaggcagctttatcagcatcagacactttcttcagcagtaattacatgtgtgtccagacagcattttcataagcagttcagatgcccaaaatgagaaacagttttggaagtcgctctgtcaatcctaccaaaaggcatactgacttctgctccctgcttccatcagattatgccaaaagagagacagagacagagagaggataccaaatttgattttaaatctacctattctaagctggaaataaaaactcttcctgtcctggagtccaatgcactcatttttccctctcctcaatcttaacaccctgttaataatcagcccaggcccaacagcctctgaaccactacatttcctacagtagtcccatatggcgcttactcttattcaaatacttcatcaaaagtgctcccaatcaagcatgaaaataaattagattttggtttaatcacgattagagtcacatcaccaagaaataaagtaacagagttacctaatctaacagaccagcctgtgacttcctggctgctttccacaagcccctcttgctaaagccctctcctaaaactcctctttgaagactgtgaaatcacatgttggtggaaaactgttactcttcaaatgtcacagacataattcttaactctgtgcctgcctgacattgctagtcaggccacaagtagagttgctgggtgtcggcctgtgaaaagtagcccggcccgacaaagcatcagaatgcttcttattcttgggcactctggaggagccttcctgggcttgggcagagcccatttattttctgtggagaggctattcactcttgggctgtattttatactcactttcactcctactggaaataccaaggcgtgagtactgtgcaaagccccaatatggagaaaataaaaaatggacaaaggagaagaggactaagggattgataatccagaatatgcaaagaaactctgtaactcaacatcaacaaaagccaaaccagatttaaaaataggttaaggacttgaacagatatttttccaaagaaaatgtataaatggccaataaacacgtgaagagatgctcaacatcactaaccattagggaaatgcaaatcaaacccacaatgagataccacttcacagccattaggatagctacaatcaaaaatataaaaatttttaaaaagaaacggaaaagaacaagtgttatcaaggatgctgagaaattttaaagaaaggagaggcttgaccaatcactccctgtcaacatacagcagctagcaaaccagccaaagagtaagctcatctcattattccccccgcaaaaagaaaggcgtattgtccctgctaggctccaacaatctttgtcaataaaagcctgttgagagcaattacaacacaccctaaaaccacagttaaagctaaaaataaattcttattactaattacagttgatcattgaacaacactggtttgaactgctaatgtttgatccacttacatgtgtaaacttagcttctgccacctgggacagcaaaaccaaacctccctcttcctcctcctcagcctactctacatgaagacgatgaagatgaagacctttatgatgatccactgcatgaataatcaatatattttctcttccttatgattttcttaataacattttctttcctccagcttactttcggactatggtatataatacatgtatcatataaaatgtgttaattgacttatgttatcagtaagtcttctggtcaacagtaggctatcagcaattatgtttttgaggagtctaaagttatgcacagcctgggtgactggcaaaatcccatctctacagaaaatacaaaaagtagccggatgtcttggcatgtgcctctagtcccagctacttgggaggctgaggtgggacgatcacttgagcccagtgggtagaggctgcagactgcattactgtactccagcctgcaaaatggaattctactgcaggggtggcaggttggtgtttctatgccagcatggtttaagggtcaactgtattttgatagtgtgatctgtaataatgttgtatctagatatgatttactgaagaattaaactttctccttttaaaataattacagaatattccaaaacacataccttaatgtaaatatcctgtaatatagaaatagaggaagttgaggcagaagagaaaaaaatatccctgggaattagaaaaataaaatctcagtactacatttccccttttgccactagcaagccttcttcaggcctcagtttctttatcagtcatgcaaatggttaggacaagatatcgcttaagtcaaatatatgcttaatagcaccacccaatagaagcacttcctttgtctgattccatgtttgccaggcaattttctggtcataatctgactgccaagtagtttttcaataggaaataagtgtcagcattccagtctccttgcagttatatttgttataaatcaataaattgatattaaagttcataaaaataaagtctgattctaaatagttgaaggaaatgggtccatgtgacagtggaaggcagttttcaatttttctaattcaaaacccacctatattatacaacatcagcatccatcaatactgaaccatcaatcaagggaaagcaattttcaaatcattcttggccagtgtccatgccactcatttttttaaaccattcctttttaggggaaaatgaattcacatacactgaagatgtcaaaaaaataattacagtgtatttttatggtacataataattacttttgactacagaaaatgatacagtttgaaagtttgggaatatacacaggcttcaaaggcgggaagccaaaggagaggcatctgacgatggatcactctgccctcttctgaaaataccttctttaactggctttcagaacacaactttccaggccttttctttgctaattcctcctcttccctacatctccccctgcctaccccgccccccacccccacaaaatatgaaaagaataagaaagtaaaacaaattcaggcctgcgttggaaactctccagggagatccagatactcttccagggcttatgaagccctaggtgatctggccagaactgttttcttggacctcatctccttccactctccccctgctcactctgctcccagtcattgctgccttgccactcctgaagcatagcaagagtgccctgggctctgcaccttggccctcactcttcctttctgcctgaaatgattgtcccccatcttcacatgactgtgtccctcatttcacagactcccacagtgaagtcttccctgatcactcaaacagcatccctccccatttcattccctgagagtttttcctttacagcacatatcaccactgaacatttgtgtactgtctatgtatctgtgtaggatgcatagaacagggactacatcagttttgtttgttgctgtatccccagtcttacaatagcatctgacatgtagaaggcacacaatatttgttgactgaatatgtgaacggttacaagataataaattacagtcaaaatgaccaaactaaattccatcgaatgggtactttcaccaaaatagaaaaggagttaatccaacacatctgtcacagtaaaatggcaactgggatttggtccaaacaacaacttcaaagactgttgatatcctatctaccacatattgactaggtgctggcaatatagtgatcaactttactctgtctctgccttcaaagacctcatggtctccccaaggaggccaacttgtaagtattctgaacacagataagggaaggaacaactaacctggagacaccgggggccgctgggagaagagcaagaagactctaagagtgctgtgtgttctatggacaagttcacacaacccacaggaaaacaggaacaaggaattactcccactctcaccacataaccagtcagaggcctccattccttttctaactgcaaggccatcttttccctagttggcattcttcctttgacaactgcttcagtatttctcacaaccccagctgaagttaactgacatgcgcacacacattgaggtttcatgaaactttctgttctcaaataatcacacaccatagattttggtttaagatgcatttccacctctggccccataagtcctatgcgcgttccaggcactgatcaaatctcatgacaagggatctgctcaaaatattccaccaaccaaaacatcaggcagccttcaccacacaaatttcccagttcaatgggcttttttattgcttatttacaaagttaacaaactcaacatatggtttttggtatggcaattggaattaatagctgctaactacagaatttttttccctaaaagactttctcaaggtttaaggtctttgctgaatttaagaaatatcttgaaagattcatacatgcaaagtgctttacaaccttattcactcctgtggcaatgaaaacccttgaaaaggtttcctctttcctctctgtaccaattttggctgtttctagtcaacaagagaaaaaggacattggctagaaagacagggtatctctgtagttccagtaaatatttactctataaattgaacttctgtttatctgtgtaatccacattacttgcttttttctttttttcacccccaagagtgaaagatatcactgttgggaatccgggcagatatatgggggaggaaagagggttcaaaaaaataattacatacaatttatctctgctatgacatcctctcaccaatgtaaataatccaagtcctaactaatatctatcaattcttgttgtcttctttggcttgtctgattttataaccttgccaacacaaacccctcctctcagaatctagagatggcttaaaatataattttcattttctgtaatttgattccctggatcaaaaactaactttgaaatcttcatcaacaacttcttttttttgagacagagtctcgctctgtcgcccaggctggagtgctgtggtgcgatcttggctcactgcaacctccacctcctgggttcaagcgattctctgctcagcctcccgagtagctgggattacaagtgcccgccaccatgcccggctaacttttgtatttttagtagagacagagtttcaccatcttggccaggctggtcttgaactctcgacctcatgatccacctgtctcagcctcccaaagtgctgggattacaggcatgagccaccacgcccagcccatcaacagcttcttaattttgctataaatgcaggtttgatcttccaattgcagccccacctgggagaaagccttcctcatgacttgcattgggtaaatcagctaggcagctattacaactgcacacttgactttatttcctgagtatcaccatgacattccctactctagataagtgtgcccactcacactcagggttctggcatctccaattggtagcaactacctctaaggtgcttccttaagataagaagtcttgggacttaaaagcttcccaattggtcaaagcacttcctcagaatcaagcttctctccctgcttccaggtctgtggccatcccagttctgatcacctacctggtctttgagtaacttctctgttcatatcacatgttctcctttttcttgtcttccacctggttccagccaaacgaaccatctctgtggcttgatctactgcacctgatccactgcatttgactcaggacctcaatgtcatgttcagcatgtgcttctgcaagacctggctgtcagccgctgccttgccatgcagccgtggccactaacttcactgggcccctttggctttctccccaagcctcggcactctgcagccccacagtgatttggccaactgtagaaggaacttaaagccctgcctgcagggctgggaaagccctaattcttaagatatttaaagctttattcttctctttctggcacctcaagtattgtaacatcaatctctgagatgtctctgaatacacaggtagtgggtcacaggttgtaatattccaccttccttgcagtgaaaaaaaatagaagtctctctcccaacccccactgaatgaggatcacaactattccttatcgacgaatctgcttttagggctctggaaagtcaatgctttgaattcctccaccacttggaggctatggcagtgactatatccctttactctaatcatatcatttcatttttatcaaaatatctgggtattgcatagggattacaatacaaatcaagttaaacaggcttattaaaatagaatactccctccttggaacatgtgatcaaaagctgagggcagtaacagaagctaatgaaaggaattaatgtacacatggattcctctgagtgtgctctggagaaaggctacctgggcacaaatcttgactccaccttttacagtctgtgtagtttcgatatgcttttcccccttcttatgccataatttctaaacctgtaacatgggaataacagaaggcacctcagagttttagacaagcatgtcaatatctgggaagtgcttagaaaatgtgattcagagttattacaaaccacaaaatgaacagctataaagcaaaacaaaacaaaaaactaaaaaccattgccaggcattgggaattaagaagtcagggttttaaggtaggtgcggtggttcacgcctacaatcccaacactttgggaggctgaggtagatggatcacaaggtcaggagctcaagaccagcctgaccaacacggtgaaactctgtctctactaaaaatacaaaaattagccgggagtggtggcacgtgcctgtaatcccagctactcaggaggctgaggcaggagaattgcttgatcccgggaggcaggttgcagtgagccgagattgcgccactgcactctagcctgggtaacacagagaggctccatctcaaaaaaaaaaaaaaaaatgaaaagaaaaaagaaagaagtcagagttttggacaaggctctgtcattttgtggcttctggagtgggtttaaattggttgcaaattctttgtgacacccctcttggagaggtgttttctacttacttctttaaccttaatctaggctgggaaaacagctgttttgaccaacagaacacacagaaatgatcctgtgcccgtttcacttccatattttaagagaacaggcacctttacctcctctttctcggaacccagctgccatgctgagaggaagcccaagccacatagggatgcccatgttgaagagaattgagctgatctcccaattcacaggcaacattagtttgccattcatatgattaagccatcttggaagtagatcctcttgctctagtcactgacacaagtcttccccctgaactctgcccaaactgcaaatccatgagtaaataagatggttattttcaacctctaaattttggagcagtttgttggattctgcaccaggtcttgaccctgctcttcttacgcttatgctaatgctatggctaagacagacattcaacagctcattacaatgaagtgtgattttctaaaggcagaggactataaagaggcaaaaaagggtgtgtgaatactaggtgatctttcaggccccttccaatgctgatattttataattaatttgatgatgaacagcacagctgcgagctggccacttggagatagtcacacaagataatctaggtagagaacaactttcttctatacaattctccttcttaattagagcatcaacgaagaggtggcatttcaggagttactcaacacgcaaatggtgaaagcatggagagttgcctctatggcctaattcagaagtggaatgatctgatacaaaatgatttgaatgaagatctaagaagaaagtaagggaaatatgatttccaggggcatccaatgtttccaagtaaatagtgatgcagaattttgtctgtccattgtttaaataatgtttaaaaggcaaagagtttaagttgattgctttgtacaaattctttgagtaagaatattttttcatctccagaggttatgattgccatgggagaaattttttaaaaataaatttttatttttgtacataaataggcaactgtctaccagacaaccagatcaagcagacaactactctgcaagaataagtaaagtcaagttttaccctaatattgttaaaccttaagatatcttccttccagatacctgggattatttaacaagattaaactacatactggccccacaaatttaaccaagaccaatagagctaactgctgatctaaaagtcacgaccacgaagaatatgccagagctgtcccttggaagatttcgggagaatttaatgctgcttaaagtgtggccattcggcttcttgatcatgggggagagaggttgaattcaaacatttagtttttgcaatgcttttgatttgcctgatgttgaagtccttccttaatctcaattttaaaaaaaaatcccttcaaatctttatgacaggaacagctatagccaagaaaaaagaacaaatcactagtttatccgtctacattttccttttgtatttctgttgttactgctatgaattcctttgctttcaaaaaagcgttcagacttgacataagccatttatggtcaataaatacataaaaatatgtttgaatgttcatagaggcaattttactatctgctgtaatcaactcaggatcttaaatggctattgttcaaactaaagatacaaaaggaacacactcatgaatttcctgttttccattttgaagtacacatgcaaaacacctcatgcccaacacccatccctaggtctcctaattgtgtatccctcgcacacaaatccctcctatctccctagtatccaagcattcctggagtactaggtgcagaggccaacacctcagtggttgaccaaagcttgctgctgtcactaacaggatcagcagatgacaaccagaaattgattaaactcactctctagttcaggatgttacagagtcagtgtcaacattactgtcaaagagtcaatgacttctgtggctaggggacccttacagaaggagtaagcccgcaagtcaacaccaatgagagccattttgtttatgatacccaggataatggcaggtattttcagagttcttcctacccctgaaatgcctactaaacatcaggctgaaactgaccccacagtgacctctagacagcattgaggctcctgggcaatcagagagatggcactaaaggggccctgaggggttttattagctctgcttccaggtgaggaggaggactcaaccatcaaaagtgaatggcaactttgccctacaagatattaagcgaaaactagtgtttaagagaaaaatgacagggaatagaaacaccaaagatctaatgtgaggaatacaaacgaattgtatttgaatctatggatactgctctgtggatattagaaaaatggtaaatactaaagttattgcccatgttaaattgaactgagatttagggtccacaaggtatgaaccacacactctcttgccttacaaattatctttacacatattctaatttaaaatatgtacaagccgaggcaggcggatctctttaggccaggagtttgagaccagcctggccaacatagcgaaacctcttctctactaaaaatataaaaaaattagctgggcgtagtggcacatgcctgtaattccagctactcgggagactgaggtaagagaatcgcttgaacccgggaggcagaggttgcagtgagccgagattgcaccactgcactccagcatgggtgacagagtgagactctgtctccaaaaaataaataaataaaaatttaaaaaattagtgcagaaagtaaaaataactaccattcaacctgcaggataactaacattgattggaaagaggtacaactaaatcatggtacctaaaactggctcgaaagcaagcaaaaaatgaatgagcagacaccgatgagaagaaaagaacatctggtaaaggatatagctgaggaaggaacttatttccttaggaacaatattatgtcatatactgctcaaatagttttccagccaatgcagggactacaaagcactctcaactctttcatttgcctacaagctttatagggattacttagggagtggatacaactaggcaaaaaaaatgggtaattttatgtggcacctgagtgtcacattctctgctcacccaatgtgctcaaggacgtgccaataggactaaagtcaattcacatctcttccttcactcagggttctagcccccccttctcctaagtctgcgattcatttaaacaaaggttactggacagcactctgctgcatagaaacatcgtgaagggcctggcaaagagtctctgcaaaagaaatgccttcagttttggggttttcaatgaccttagaagatcaccaaaggcttctcctgaaacagggttagtgatggagcagggccctgggttctagttcagatttgagaccgttaattataaaattggcaaaagtcacttaaatcctcatgcctcctccctcacctcccatttttaagttctcactctcagcatttcttgagtcttctacatcacaggggcaacagccgttaaggattagcaaatgctctacttcattcagccagcacctcaaaatgctatttcaaaccggagcaggaacagcacagcagcagcatgacacttaagagcaccaggcagggcccaatagcattcaccagcccgacggcagacctcctaggtttcccccaaccccatttaatcccccctctttcccatcaccaggtgttccctcacacacacacacccccgcaggggctccatccctgcatttttcccttcaccattggtagtctgacatcaccattatctgccttccggctgcttttacactgttttccttttcttcctctttcctctcttcagccatactcaagaaacacggactacttatgctacttttgcccccataaatggctcagtgatggaaccaagagggaaacccacagacaccaagcctctagctgtagacactaagcacacagacttcctcttcttttcagcacccagttctacgggcttctcatcacttttcaggtattcaaagctttgagggatgtgcccgaagcatccctaaaatcatgaaaaaagatggctttgggcatcttaccgctcacacatttgcatagtgtttgatgtagctttaatttcaaagctggtctcaaacactcaagtggataggttacagtgggagcccaggaattgcaaatgcgcttgcctcaaagactcaggagtccagatccgggcaggaaataaagttctaaagcggctttgaagtgctttctccccagacccctccccagcgcgggtcattcatctcagcctagggaagagaccaccttgcctgaacgtagccaaacgcatcgcacgtgggagccaagtgggagatgaaataatccaatgcgtccccctcaccaccaccacccccaccaaattagttaccgtcggcttaaactcatcgggaatgtccgtgtattttaccgatcagggaaataaaagggtgtatataaattagtggaagcgggtgggaaggaacaagggatgcagactgtcgtgagtaaaacgcctcgcggcttggtgagaggttgtttcttttttaagccactcatttcagactgaaatatcaagccagttcaggtcatttcctgagtagcactacaagttaaaacaagatccagaaaatctactaatcttcaattgcgctgcctccagactgggagcacagggggatagggtgtagggctgtggggaggtcgaggggagggggatttgtggaaaagcaaacgcccgagaaaccctagctcccgacctcagctgtttcttacctcactcagctcggccgaggagtcgtttccatatttcatggcaactccggaattcatgatgcacttttcagagctgggctctcagtcccccaggtctcggagcttaagagttggacttcacaggctcaatatccactgcttggtcccttctgccacattttagtctagacagccattttcacccaggacagttgcgaagcgcaaacggaggatgcaggcactcttaaaaagagcagccgtggctcgcgtttcacggacgagccattgctgcaggaggctcggtggcgcggcgcgctcgcagctgcggcagcggcggagcccgcgcggggaccctcccgcgcgcacccagcgccccgttccggggcagtgccaccctgggcgccgcctcgccactcctacggtgcctcgccgccccccattaccaggatggagggcacttcccagcacgagccgacaccctagagggcaccggcgagctcccgaaaaaactagggcggtggggcgaggaagatccgcgcctcggattccagagaaggaaagaaagctagagggagccggagcggagctgcacttcacgccgaagtttccccttcgaatcgtctggagttgtaagtggtttctgattgaacacagctgtctagctgctggccacggggtgcgcggaggaggcggggctagagggagaaaagggtgggggcgagtagcctggaggccgagcagaggagaccgtgctgggagagcagagcaggcatccttccagttctctgcaatagtaattaaggacccgagtccaggagggggagtagaaacaggaaaagccacctgaataatcgtgcaggaaattaaaaaaaaaaaaagaaaagaaaaagaaaaaaaacttccctcataggagccgctttccatgatttaataaggtcaagacaaacctaaacactgtacatcagacagcacggtgcacttctcacggaacattaagattttacaagggtgcagggcagtcattttccctaatcagtctaaagtcaacgctacgggtgtaaattcaatgtcaaactccctctgtctgtcactggggcagagtacattttctgcatgtccataatgaagatagaggccccatcccttgaaagatgtcgataggctccccaacccccatcccttgaaagatgtcagataggctcctcaacccccatcccttgaaagatgtcagataggctccccaacccccagaccttccttaattgagcggaggtagagttgtatttatggagtgtggagtatgattcagaaaagattcaaggggctgttatacccagtacacccctgggatctgagctccccttcaactttgagttcccgaggtaaaacatcctgtgtctattgggagagagatgagatgggggaagaggggaactaggatttttctctccacaaacttaaagttccaatgaatttgagatgcacagaaaaatgttctgatgcttcaaaacagtaggtctgcgagattgcttaagagacctcatcagtctctttctacacaatggggacaaaatgtctccatccccaataacagaacttggcatatcctgaagccttctgtgaaaaagccattgtattgtcaacttccatggtctttttaaaaaatcatgtttattttgctctttaagaaggggcagagtgcaactatttgcatataacgttttacccatcccccttcttgttgagttcattcattgcctgatggaggtgctgctgggattaggaagagtttgctgctctttctagagcactgggtcccaagtccttgggcactgccaaactagagcacattctgcatggggaggagatgggaagctacattatttaatttatcttttcattgaaatctgttgaaaactgcatgtttgaagctggaaatggtggtatatacataactatgaagaagattcaagcactgcccctgccctgaaggtgtttatagacttgtaaaacatgaacagaaatgacaattctagatagaaaatgatacttgccataaacacagtacaaatgaggagcgactgcagttcagaggagggaaatacgattttggctggacagggtctggagagaagattctgtgaaggaatcttagaagaggcagcatgtgagttgacctgtgaagaatggctgagcccagcagagatgggaagtaaggggaaagcgttccaggccactgtgagagaaagtatggatggagactggaatgtgcagagcgggcatggggatcacaggcattccattctggagcataagctgggtgagaaaggggggttggtgtcagacagtgaacagttttaagtgccatgttaaaaaaatgggccttctcaataggcaatggagagccactaaaggttttttagcatagaaataatggagatcagagctgtgcttttagatattccagtagatttaaatcacactcatgagtaactaatatgaactcaaataggctagtgttgaatgtgattctggtgtttaaagatacatatttttcatacgactctacccctaaaaccaagcagatgacttcatctggtgttcaaccaaaagaaaagtaatctgttccaaaagtagaggaaaaactagcagtgttgaacttactgagaagcagtgtctgtagattctactttatagacaatataaggcattttcaagggtaatgttgattgtatgagattttcttcataaacaatgacttgaatacttcaatacttatacttcacataagattcaactccaccacaatctggcagcagcagatgtagtaggttgaaagtgggaaatgaacatgccgattgtactatcaagacagttcagcaagaggttaaaagggcctgaattaagaagggacggctggcatggtggctcatgcctgtaatcccagcatttgggaggctgaggcgggcagatcacttgaggtcaggaattcaaggtccagcctagccaacatggtaaaaccctgtctctactaggatcatgaggtcaagagtttgagaccaggctggccaacatggtgataccctgtctctaataaaaatagaaaaaattagctgggcgtggtggcaggtgcctgtaatcccagctactcgggaggctgagaaggagaatcgcttgaacctgggagatggaggttgcagtaagccgagaccgcaccaccacactccagcctgggcaacagagtgagacaccatctcaaaaaaaaataataataatactaaacttagccaggcatggtggtgtgcaccatgtagtcccagctgtagtcccagctactcaggaggctgaggcacgagaaccacttgaaccaggaggcagatgttgcagtgcgtcaagatcgtgccactgcactccaccctgggtgacagagtgactctgtctcaaaaaaaaaaaaaaaaaaaaaaaaagaagggacaatggaaataggaggggacaggcagaaagaaagtagatggaaattgtggagaaaacaggagagcttaaaaacaacttgtagatctagaacttggctgattggggttaaggtaatgtcctcaacaaaattaggaattccagagaataaatagctttgggaggaaattaggtttgtggtatcatgagtttgaggtggcatcaggatattcaaatggagatgttcagcaggagcttgaaatggaattatggagataagtcagggttgagctggagatggaggttcgaggttatctctgttagaataataaataaaaccgtgaaatcaggtaaatttgcctaggaagagaggacagtgaaaagaaaagtggtctaaggatactaccttaaggaaggctgttttgttttgtttttatggaggccaaagaataaaagaggaaatgatacagaaggtcaattagggaaatgggaagataaccaggagacctctgcatctgggagtctaaggaagatgccaaggcagaaggaggagcagcatcaatattatatgctacagagggtagagaagcctactgactgataaggtcatttcaaagacattactgtccttcaaagatagattcctataaagctgaggagaaagaaggcagataaattaccatagggagtgaggagaaactgggggtagtgaccatgcacaattctttccataaatttgatggtgacaggaaaatgggagatgagactatcttttggagtagataagcaatgttgaatagagagtagaatgggtgtatttgtaagctggagctaagggaaaccaggagatggagcaaagttcctaaaaagggagaaaaggggagcaggtgtcaaggacaaaaactatgagattagctttggagtaggcttggataggaggggatgctgatacttcttcctaggagaacagaaacaagagaacgagagagtgtacacagtagggaagacaagaattcagagatataataactaatacttatttgacgagtaaactaacttcctctttgtaattgtgaaggggaaacgaagactaatgataatttgtaatcagattctgactcaaggaaagttagacagagaaatgcctgtcaatgcaagggaataagcagttgtgatccccactcctgaaattgttcaagtataggtgggacatgctgaaccccattgcatgtaaagagtagggcttccaggccggatgcagtggctcacacctgtaatcccagctctttgggaggccaacacaggcggatcacgaggtcaccagttcgagagcagcctgaccaacatggtgaaacccccgtctctactaaaaatacaaaaattagctgggcgtggtggcacacacctataatcccagatactcaggaggctgaggcaggagaatcgcttgaacctgggaggcggaggttgcagtgaaccgagccgagatcacgctactgcactccagcctgggcaacagagtgagactccgtctcaaaaaaaaaaaaaaaaaaaaaaaaaaaaaaaaaaaaaaaaaaaaaaaaaaaaaagagtagggcttcttgcattgagggagtctagactggttttcttataatgtaaaattccatgaaatgatttttgttggtggtaatttaaatgtcttacgattttttttcacctcattgtcttggatctctgctatcaagaaagctaagatactgctttgaacaagaatgcaactgggtcaatattataagaacgttagaaacatatggaccaactcgtcatgtcttctcaacacaccaaagaataaagccccaagtaggtttcaggctataagtaaaaggtttcacaattagagcttgccagcgtttaccaagtgtataactctacatgactacaaatcctgttatactgtggctgccttaacatgatctctccaagaaagcttctccaagtcctcctgcttcagcagggattaagctcctatggagaggtgtgggcaggaggtggcaggggaatttatcaagatgagggagcaggtctgggagaaggaggaaaacctgctttgcaatcaggcaatagcctggtgcttgggttcctctccttcctgaggccttgtcttctctaaagcccagtctcttctcatctggtccctgggatgagaagaggcagcagcagtcttgggaacatttctaggtaagtggaagctgccctgggcatgactggatgaggctgtgcaccaacaccatgctgtgggcacactggcatcacctttctgctgttagagcagtctggcctctctgtgtatggctgccgacttcagtgaatctctacatggcagaaactctattctgggtctggtctgtaccctctactggtgataaacatcaggttaattgaagcaatcttgagaaaaaaccctgaacctctagcactagggaaactgaaaaccttggaattagttggcctggtccactgtctctacccctggggtgccccagcgatccttgcctaccccagcagtccactgtgctgaggaagcctgtcctccagcccacaagagtacccaaactctaaaattgtccccttctccattgactctctcaagctaaacaaaacgctgatacctcagattttaggttgaaagcagtctggttaaactaattcacacacacgtgaataatcttctcaaccacgcccagagtgtttacattgtaaaaggagaatgctttgaaataattcttaaattggtgggatttcctgaagaaagtgaattttgagggcatagggggatttcagaaccctatggagactcaggaagtctcagtcctttgagtccttgaggatcataaaaattagggagccctcaaagtacatactccaaagaatttcctgccctaaatctataagctcaccccactctcccaccgctgtgactccagaaatgctctccctatccaaactcctgtggccttctgatcaattaccggaccagctcctctctcaggtcctggtttgggagcctctcaccagcctcaatggcctgccccataacggacatcatttgctcaaggaactacaacatgaagaactcaggaagcattgcaatgaatgatctgtatcctcatctctatatcctcagagaaaaacatggacaacctgcaaggaattctgtagttacctagctcatccctgcatcccattcatatagatgaggatatgtagggtcggcgagtttgtggtgttcattcagaaaaagtaaagcacccactgtgtgctagatattgtcctgcatgtgccctgggattcagtggtgtatgggatggaaaagatccctgctttcacagagctagcactcttgatgggaaatgattaataagtacctttaaagagatagttacaggccgggcatggtggctcacgcctgtaatcccagcactttgggaggccaaggcgggtgggtcacccgaggtcgggagttcaagaccagcctgaccaacatggagaaaccccatctctactaaaaatacaaaattagccaggtgtggtggtgcatgcctgtaatcccagctacttgggaggctgagggaggagaatcgcttgaacacaggaggcagaggttgcggcgagccgagatcacgccattgcaccccagcctgggcaacaagagcaaaactccatctcaaacaaaagaaaaaaaaaaagatagttatagggcaacaagagtgaaattccatctcaaagaaaagaaaaaaagatagttgtagtttgtgttggatgctataaaggaattaaacaggagctatgataggggagagtaggccccttaagtgaacaggtcagacaaggcctctatgcagagatgacatttcagcatgtaggtaaagaaggagccaactaggcaaaaagtgagggaagggtggacaggcagagggaacagtaagggcaaaaagcctagggaaacagggcttcacctttttaatacattttaataaacttcaagtttttatttaattgaaatttaagctcattataatagtttactagcagtgatggaacatgatgaaaaagatcatgtcagagccaaatcgtgcagaatatgtatagactacacatttcactgtgtgcatgaagatgccacaggaagactttctgcagggcaaagacatgatccagtttacatttttaaaaggtaaatctatgtcttcacaagctttaccactaggtaacctaaaaagtaaaaaccaaggacagttcctccctcatacaagtatcgctgctaataaattaagaattgacaaaatatccctgttttgcaacccttaatgaattaatagatttaagtattagcataatggctacgaacattacaaaaggacatagagccagacacatgatttctgatggaagaaaacattaccacctacagagccaccttagcagtttttacatgaagaaatgttacattaaccacaaaaaaaaccctatataactctactagacaaaacaatgtggtttcttcatcaaataaaatgcaaagggaaaaagggaagtaagcaaatgagaaaccaccaaaagaaaaactctgcatattaaaagagactcaaagacatatcgaccaatggcaatatgtggactttgttgagatcctgattcaaacaaagtaactataaaaaattatgaattgtgaaaattacatattatacagtattcagaaatatactttttggatatttcatgatgttaagaaattattaatatttttagatgtgttaatggtcttgtggttacatttaaagaaaaagaatcctgtattttagagatatattaaaatatttaggggtaaaatgacatgatgtctgggattcatgtcaaagtactagaggaggtgggaagacagggttattgatgaaacaaactgtaatgatgaattgataactactatagctcagtgataggtatgtgggaattcatgctactcgctgtccaagtgtatgtgtacaaatcttcaaaatcaacaagttaaatcaagataattattccttctgtgtaaaaactgggttgaagtgccataaaagtaaggcaaggaaacctgttaaaggctattgcagtggtccaggtaagaggatgtttgtggcttagaacttggtgaaatcaatggagatggtaagaaatggacttgagatgtattttttaggtaaaactgaccaggattcagtgaatgattggatacaggtaatgagagaaagataggaatcaaggatgactaccagtttttgggttggtgtggggaaggaccaagtttcgcagaggaaatcaagtgttccatgttggatgtgttaaatctgagattcctatttgacatctaaggggatgtcaatagcagttgcatatatgcatcttgggttcatgagagactccagaaaatggtgatgatttggaacttattggcatatagattatagttgatgttgaaggtcatgagaacatatgaggtcaccaagggagagagtgagtaataatgcagtcccaggacttatccttgagatccttaattctttcaggttggatagaaattaccttccaccaaaaccaactttaattgcagcttacagatttctgtaaatagaatcataagaaagaacatccagagaagaacagaaaaactgaaaactgtatcatgttttaagaaggacagtggtaacctgtgtgggatgctgctgagagtttaagaaagctgacaatgaagaagtgtcatctggctttggagattactagggaccttgagagaatcaatgtcattaagtggtggtgatagaaattagacgagtgtggattgaatggtgtgtaggaagtgaaaacactgagagagcatatggagataacttcttttttttgagacagagtctcactctgtcgcccaggcaatggcgcaatctcagctcactgcaacctccacctcccaggttcaagtgattcccctgcctcagcctcccaagtagctgggattacagtcgccagccactatgcccagctaatttgtttgtatttttagtagagacggggtttcaccatgttggccaggctggtctcgaactcctgacttcaggtgatccacccgcctcggcctcccaaagtgctaggttttcaggcttgagccaccacgctagcctggaggtaacttttgggaagtatgttgcccaaagccttactactagtaaactatgagaatgagatcttgaaccaaagtctctacttgtacttctgagcttttcttcctttactatgtcccttcagtcaagctagtagaagcacctcggcaaggattagagaatctgggctgttagcatggttgacccctcctaaaactgctcactgaagtctgtcccatcatggccaggtcttcaccttattgttcatgaagtcagctacactgctttagacccagtgacttaccactaaaaaatagttgggatgcagtaggtaatttggttagtctatgtttaaaactggctaagaaaagaactacttgaagactatttccagattacatctcacatacagaaaaaacaaacaaaaacccaaccttctccaactgcaaatataactcaagcaaagaaagcacccccgtggtgtttgtctgtctcattagttacatttacagactgcttcacacccagcctaggcatcctaataacccacagtcatttggcatcaacatctccgacattatcagtggggatttgataatgatttgagattcactactttatgcaagcatcatgtgatgcatcaaataccccttcactgtctgattagatattttcgagcctaaaacttagtatctgtgtcattgtcaatattcagagtatctttcaaaaatttttgctcatttgttctccaaatttctttaaactatatcacattttctatggaaaggaaaattaatcagtggagattagagatttggaaatccaaggaagttaaaaaaaaaagttttgagtcctcccaggagtacctgcatatggtcaatttcctggagaggaaaacaaaaaaagtattttaaatagatgcataaaaatagatctagtaaaatttggagaacatgcttaaattaaatgaattccaaatgcctgccactgttatttctggagctgtttgggctaaaacagcatcattccattactgtctcttagctagaatgttacggcagctacccaaaaggggcaaaaaaaaaaatgagtatgatatgatgcctcatatacttaataataaaggagtcagttaacctggtattgtatcaagctgaggggtgaaggaaggtctgaggcacaggctgggaaagccaccttcctagcctttgagttcatgaagtgcccatggatggactgctatggtagggatttcctacagggacaggctgaggcatgaagaatgggctcctgcctactttgataagacagcttccctctcccagccatcctcagttgttttgcatgattatcacatgagctcaaacttccccttctaagcaaatcctttcaaattggcatctccagctactcttacctgtgctccagttaatattctttatgtgacaaccagacactcttgctaagttctgtcatcactataaaaccatgtttaaagcagaatttgtcaccttccaccaaaaaccaactttaattgcagcttacaaatttgtgtaaatggaatcatagtttccagtctaataagtttggagtcattttcagttccccttccttcatcttctcttccagtcatgtagtcctttcgtccccacttgctctccacttttaccgcttagcagcacctttcccaggccttgtcaccttacattttggttactatagctcaatgatatgactccaaagcattccatatactctagcccagcgatttttctccaaagtacagttttccgtaatgtcattctacaagttatattttatgttttattaatggataattcacatatcataaaatttaccttttaacataatttagtggtttttagtatattcacagagttgtgcagccatcaccactatcttatttagaacattttcatcacccccaaacgaaattcatactcattagcagtcactctgtatgtatccctcctccagccctggcaaacacaagtctacgttgtgtctctggatttacctattctggacacaccatataaacagagtaagacaatatgtggctctttgtatacggcttctttcacttagcctgttttcaagttttatccatgttgtatatgtattaatggttcattcctttttattgccaaataatattccattatatgggtttaccatattttgtttatccgttcatcaattgatgaatatttttgttgtttccatttttcaactattatgaataatgttgctatgaacatttgtgagcaagtttttaatatggacatatgttttcaattctctcgggtatatacctaagaatggaattgcttggtaatagggcaattttatctttaagattttaaggaactaccaaattactataatttccaagatggctgcaccatttcacattcccactagccatgtatgagggtttcaatttctctacatctttgccaacacttactgtctttattcttgctatgtggctttgatttgcattaccctaaagattgataatgttgaacatcttttcatgtgtttgtaggccatttgtatatcttctctggagaaatgtttattcaaatcctttgcccatttttaaattgggttgtctttttattgtttaattttaagatttctttatatactctggagattagacctttagcagatataaatttgcaaatattctctcccattttgtgagctgtcttttccctttcttggtagagccctttgaaacatcaaaattttaatttaatgaagtccaatttatctattttttcttttattgcttatgcttttggtgccatatttaataaatgattgcctaatgcaaggtcacaaagatttactcctattgttttcctctaataatttttttagttttagcccttatgttgaggtcaatgatccattttttgttaacttattattgaaaaaaaaagtattctttcctcccactgaataatttttgtacccttgtcaaaaaccaattagccataaatataaagatttatttctggactctcaattctattccacttatttgtatgtccatccttatgctaatactacacatcttggttattggagtttcatacaaagatttaaaatcagaacgtgtgttgagtcctccaactttgttcttcttcagggttgcttgggctcttctgagtcccttgcatttcaaagaattttaggatcagcttgttattgtgccaagtagacagatgaaattttgataggcgtgcacggagtctgtagatcagtttgggaatatcgacattttaataatattaggtcttccaatccatgaacataggtgtcttttcgtttacttaagtttgctttgattcttttcaatggcattttgtagttttccatgtataaatcttgtacttctcttgttaaatttattcctaagtattttattcttttttaatctattgtaaatgaaatgtttttcttaattacatttttagattgtttatgaatgtacagaattgcaattgatttttgcacattgatcttgtatcttgcaagcttgctgaactcatttattagttctaaccttttggtgtatttcttggaattttctatatacaagataatgtcatctgcaaatagagatttttttacttcttcttttacaatctggatgtttttatttctttttcttatttagctgtcctagctagcatctctagtataatgctgaatagaaatggaaagagcagacaactttgtcttgtgctgctcttggcagggtggaggggaggcattcagtcttttaccattaaaaatgatgttagctgtaggttttttgtagattcccctttttcttcaataaatttttatccctgaccacttgaatggaaaacacttcttccatttaaatgcaagtcaaggtgtcttcttactatctttcccaagctcattcccacattaatgtatcttcctgttgctctttctcctgcgtggagtgtcagctccatttgcctgtctaaatcctttttttttttttctaaagacagagtgttgctctgtcacctaggctggagtgcagtggcacgatcatggcccactgcagcctcaacttttcaggctcaagcaatcctcccacctgagcctccccaatagctgagactacagacgtgcaccaccatgcctagctaattttttatatatattgtagagacaaggtcttgcaatgttgcccagggtggtgcctgtctaaatcttaacaattctttggtgcctgtctaaatcttaacaactttttaactcttgtcctgacattaacctttctgttctctgaagtccttcagcactctcaccttgatagctccattaaaaggtgagctgtatgatgctcagttcaattaattaaagagaaaaacagggctggtatgactgtatcagtattagaaaatattaggaaacaattcttactgagttggtacatgactactgccccaaaccagagagtgcccactccctcctcaggttgccccatccccatctctaaaaacctccagacctttccacagtttagcagccataagactaacactttgggctaggcatggtggctcatgccaataatcccaccactttgggaggctaaggcaggaggattgcttgagcccaggagttccagaccagtctgggcaacatagggagacctttgtctctacagaaaatctaacaaaaattatccaggcctggtcccagctactcaggacgctgaagtgggaggattgcttgagtccaaggccaccttgagccatgattttgccatggtactccagcctgggagacagagcaagaccctaagaccctgcaaaaaaaaagaaagaaagaaagagagagacagaaaaaaagagagaaagataaaggaaaagaaggaaaggaaggaaggaaggaaggaaaagaaagagagggactaacattttgattttgcacaaccaaggtttctaaaatcttcctccattgctatggctagtccccattgacaagtattttgaatattattcctggagaaaagaggccatatttttaaaatgaagccagagtcaaataataaatctctttatcaaagatactcaattacattgtccaattaaactatcatcatgctcttacagaatttcctaacagaatttgaatcaacatcccccaactcctttaccactctctgaatatgaaacccatttactgttatacattcttttttaaatttcagtagctttagaggtacaagtgatttttggttacatcgataaactgtataatgtggagtctggactttttagtgtagccatcactcaaatagtgtacactgtagccaataggtaattttttaccccgtgttcttctcccaccctcccccactgagtctcccatgtccactctgcatgcctctgcatacccatgcatgcagcactttgctggcatccccacagcttatctcccatttataagtgagaatatgtggtatttggctttctattcccaggttacttcccttaggataatagactccagttccatccaagttgctgcaaagacagtatttcattgtttttttccaatggctcagtagtattccattatatctacacatatatacacacacaccatgttttctttacccactcatctgttgatgcgcacttaggtttattccatatcttcatgattgtgaattgtgctgtgacaaacatatgaatgcaggtgtcttatttatataatgacttctttttctttgagtagatatccagtatctgggtattgctgtatcaaatggtctgttacacattcttaacaatacatttcatttctttcctttctttctttcctttcaccttctttctttcattccttcttcctccctccctctcgcccttccccccttcctttcttccttccttctttccttccttccttccttcttccctccctccctccctctcttcctctctttcttctgtgtttcataccattatcaatattttagaatttcatattctagaactaaccaggctctgaaatacttggcttattttcccagttataaggaatacacgatttgaaggcaccagcagcctactcttggcccttcagagcctgttatgtggaagcctgctatggtttgaatgagggtgtccccttcacaattcatattgaaacttaatccccaatggaacagcgttaagaggtgtggcctttgggaaggctccactctcataaatgagattaatacccttacaaaagggcttgaggttgaatggagtgctcttttgctcttctgcttttttcaccatatgaggatacagtgttcctcccctccagaggagatagcaacaggggtgccaacttggaagcagagagcagcccttaccagctaccaatccttctagcgccttgcttttgaacttcccagcctccagaacgctaagaaataaagttctgttctttaaaaatcacctagtctgtggtatcctgttacagcagcacaaatgaatgaagataaagcctatgacatatgagaaagctagcccaaacctttgtccaaactaatgaaaactacttatttttttcatatctaaattattaagtttttgttctgtttcttcacatagttcatatctcacctttttcatttgaaattatttttcaaacaccttccactactgtcactagtgatagagagggaaatgtgtcacatgggaaataaaagctaaccctgaaatgcaaacagctactatttgggagaatttgggaatttgaaaaaacacaaaatggataacaatattggactaatttattttatctttcttaaggtgggaacctccttcaaaagtggacatttctctggattcttgagacaactgcattaaattaatgctttttcatattccatccttccttcattaaaaaaatatttatcacccactatgtgccaagtatcttgttgggtactagagatataatagcaattaaaaagaagtccaccagctgggcacagtggctcatgcctgtaaatctcagtactttgagagacagagaagtgaggatcacttggatgcaggagttcatggttacagtgagctgtgatcaagccactgcacttcagtctgggtgacagagcaagacctgtctcttaaaaattaaagaggtacaccatcattgccttcagttaaacttagagtcagtttgtggtagaatgcaaagatggccccatactttacccatgcctgtaaacatgtcctttgcctataactttgtagtaccctcccactctgactctggacttgtccatgtgactaactttggccaacagaataagatggaattaatggtatgcccgtgtctcctccttaggagtctgtcatgtttcctcttacatatctgccgctaacgtgagtgcatgtctaggccagccttctggaggataagagacaggttcagcagttgctctagtcacccaaaccaaggtctggccagatcagccatcaagccagcttatcctcagatatatgagtgagtccaggctttacagtcaagaacagcagctgccctgccgacctgcaactgaccccaaatacatgagcaataaacacttattggtgaatgtcactgatatagtcttttaaaattacacaacattgttgtggcaacagataactgacacattgcttaatcattaaaaaaaaataatagctggccgggcatggtggctcacgcctgtaatcccagcattttgggaggctgaggcgggtggatcactgaagtcaggagttcaagaccagcttgggcaacatggtaaaaccccgtctctactaaaaatacaaaaattaggctgggcgcggtggctgatgcctataatcccagcactttgggaggctgaggcgggcagatcacaaggtcaggagttagagaacagcctggccaatatggtgaaacgttgtctctactaaaaatacaaaaattagctgggtgtgatggtgggcacctgtaatcccagctactcaggaggctgaggcaggagaatcgcttgaaaccgggcggcagagtttgcagtgagccgaggtcgcgccactgcactccagcctggctgacagagcgagactccatctcaaaaaaacaaacaaacaaaaaattagctgggtgtggtagcatacacctgtggtcccagctactggggaggctgaggcaggagaatcacttgaacctgggaggcagaggttgcagtgagctgagatcacaccactgcactctagtctgggcaacaaagcagaactctgtctgaaaaaaaaaaacctataaaactgcaatgtcttctctgaaggacagggaatacagaaatatgaatacatataacagagttcacatagactggtggggagtgaggttaaggaacatttctttaaggaagagatgtctgacctaagatctggaagacatgcagaagttaaccaggtgaagggtaggggaaagaggtgttcaagtcacagaaacttcaaatacaaaggccctgtagggaaggagtacagatgctgagttacttagaaggtcaatgcagctggagaatggagataaagaagagaatgcaaagaaatgaggctgggatgataggcagtgactagaacaaatgaaaggctttgtagatgatgtgaagggtttaagacttgatccaaagaactatgagaactactgaatggttttaagatggatacaagttattcttctcacatgcttactttgctatgaaatgggtagggagtttctcatatatataccttgaaatttgcccataaaattcataatctagtcctgaaaaaaatatttatttatccatctatttagtcaatgaacatttattgagaggtttcagttgggaataaataaatgattgagagattaaatgaatgaatgagcctgtgtcaagcaatctgattggcactggagagacacaaacacaagattcctcctcttgataagctcacagtctagtggggaagagagacacacaaaaaacagacttccttgttaacccagagaaatatgagcaatgtgctttaaaagtgtagagaaggggcctggcatggtgactcatgcctgtaatcccagcactttgggaggccgaggcaggtgaatcatgaggtcaggagttcatgaccagcctggccaacatggtgaaaccccgtctctactaaaaataccaaaaaattagctgggtgtggtggtgcgcacctataatcctagctactcgggaggctgaggcaggagaatcgcttgaacccaggaggcggaggttgcagtgagccaagatggcaccactgcactccagcgtggtgacagcaaaactccgtctcaaaaacaaaaaacaaacaaacaaacaacaaaaacgtgtagagaaggaacatctagttctgtgaaggccaaattgcactcactgaaagcaaagtgagcttgaggaaattatggctcctattctggcccgagagttcctgtcatatctgatagcggtggttggggaggaaggagggttggagatatgatggcaatggcgagctactaaggaaaagagatctggagcactttctactctggaagtccatctcctaatgcaggagtcacagatcagtattggccttcagctattttcttgggttcctatttactagggatgttctttatgcatcatctggtggaagactccagagagtctggaaagattcttatatttctaaatagatattccatattctctcaaagctcccagggagacctgtataataatctgccattttctttctctctctctctgtctgttttttgttttgttttgtttgtttgtttgtttgtttcagacagagtcttgctctgttgcccacgctggagtgcagtggtgtgatcacagctcactgcagccttggcctcctgggctcaagtgatcctcccgcttcggcctcccaagtagctgggaccacaggtgcaggccaccatgcctggctaattgttattttttgcagagacatgatctcactatgttgcccaggttggtcttaaactcctaggcttaagcaatcctcctgcctcagcctcccaaagtgctgggattacaggtgtgagccactgcacttggcagatatctataattctaaacagatattccagattctctcaaacctcccagggaggcctgtataaaatctgtcattttctaggcaaaatgatagagtataatttaaaaatcatggggcttcattttgcctttaattggagttttaaaatgatagaatagacaaataagagctcatttttctaattacaatttggatggacttgggagtgaaggctggatgactgtgtccttcagttttaaagatttttatgggaattccatttccctgcaggtcctgagttgttcaaaattagaaaagggcatgtaaatgctgttagtgtcagcagcttcacctgaaagaactgtttttgctcaactccacacagtatagagccggatattctgagtattgctgagtgctcatggtgacatggtccaagaaggagtttcaggggaaccctgaactctccacctttgaccccacttggtcatttttatttttatttttctgagatggagtcttgttctgtcacccaggctggagtgcaatggcgtgatctcggcctactgcaacctctgcctcctgggttcaagcgattctcctgcctcagcttcccgagtagctgggactacaggcatgcaccaccatgcccagctaatttttgtatttttagtagagacagggtttcaccatgttggccaggctggtctcgaactcctgacctcagttgacccacctgcctcgacctcccaaagtgctgggattactggtgtgagccaccacacccagcctccattgggtcataaccttcactttgggaagtcagttcaaaagtccagcaggactggtcttagtgctcttccaagagttttgctcattatcctggattctggcctttgattctcatattctcttgatttgtagagttaatctgccaagagctttgctctccatcagtaaataagaaactgttttatgatgaaatacattataaactctattcagtattcacgttcttggcaaataaagtttgtgatccttactattggctgaggtgcttttaaggtaaagatgagaagatgttaaatataaatcccaaatttatctctggtcctcaattcttttcatcccttcatgcctgctagggaacccccaaattcctaacagtatccatagctcttcttcaacagcagttcccaaaggtactgcctgttttattattagaaattgaatattctttacgtactaaatatagttatgtatctagtgggtgctcaataagttataggtattagattaaatcatatgaaattgcttttaatagaacaaaaagagaagacgttgacaattttaaatagttcaacttaatactaagttctgctgcatacagccaacatagaaagtcgtttgaattatgttaagtaatttcagcagcatccaaaaaggtcaaatgcccttcatgtgctcctttttaaaaaaaatgacagcaggccagacgcagtggctcacatctgtaatcctagcacttcaggaagctgaaggaggaggattgcttgagcccaggagttcaatatcagcctgggcaagatggcaaaaccccatctctacaaaaaaaaaaaaaaaaaaaaaaaatagcaaggcattgtggtgtgcatctgtagtcccagctactgaagaggctgaggtgggaggatcacctgagcctcaggaggtcgaggctgcagtgagccatgatcacaccactgcgctccagcccgggtgacagagtgagaccctgtctcaaaaaaaagacagcagaagattgggatgattaggccatttcttctttcgaagtgcccaaaacaactaggtacaaagtagaccttcaagagatacacgttggccgggcatggtggctcacacctgtaatccagcactttgggaggctgaggtgggcagatcatgaggtcaggagtttgagaccagcctgaccaacaaggtgaaacccggtgtctactaaaaatacaaaacttagctgggcgtattggcacacgcctgtaatcccagctactcaggaggctgaggcaggagaatcgcttgaacccaggaggcagaggttgcagtgagctgagatcatgccactgcactccagcctgggcgacagagagagactctgtctcaaaaaaaaaaaaaaaagaaagagatatgttatattaagtagtctacttatcataagtcatattcacaactgaaaggctataacttgataatattgcttaagaccctttgtactgctaactgaattaaaataccaataacaaataccaagaaaaagagaacgaagtttgcaggcctcatctgctagcacagccactacccatgtcttgacagaaatgaattctcataaggattgaatattctcctagagctcatttatatttctgtcatgatccaataagttccaagagtgagagaaactacatttcacatagcccacatgagccctggcacatctaatctgcaatctctacctttaatttatatctgaaaaatgaatgaatgaacatctacagggatataaaagtcagggtctcataaacacaatgcgtaattctattacacctgatgcccagctctgaacatatgctagctttgtatcaaagagggtaaaccaaactgctcccccaccaccaggagacatgcaaatctgtcaaataacatagcattcagcccaacccactgatttgctcatatatgtttgtgtgtgtgtatgtatttttaaaaccaagttttaattttaatagcattcctttttaatttaagcaaagcaaaatggaaatgacactgaaacagatgcaaaagtatggtgaaaaatgtctacttggacaaagctattttaatgaaagcaacactatgcaggcttcctgattccttttagttattcaaccacccaaattagattcacttcactggctgtcttcatcagatttcacaaaactggggactaccgaaaagaaataaaaggtgagggttttccttaaagcgggataccaggttttgaacacaaacattcagattaagtgaaggaacttgattaaacccacagttcaaaataatgatgaactgaatgctggaactcagctgcctgacacactttagcatatgaattaaattttctgttcgctaacccacttaaaaaaaaactatattcaaacatctcctttcagggaattggccatatgtgaaatgaacagacccttgggtccacatggggcttggcttgcaatttctgagtttgctagaaaagtgagtttattgcattacattacaatggacactggtagatttatttgagtaaatgacactataatagccatgcctatttaatcaaatgggtcatcactaaaattcatacaggtgtaccagcagttgtttcatgactgatagtatcataaagggatgtttatggccaggtgctaaagaaggtacttcaaacaaggaggtgagtacatgtgatgacagggaaagagctgtcatgatgtatgacacggatattcctaagcacattcacaattctggagcaaaatgttttccataaaaccttcgttccacaaatagaatttaaaaatggcattgtagcatatggccatgtaaattgtaaatgcaatccacatgtcttcaacaatgccagtgtggatgggctaatgaagatgcaaatggaaaaaggtatactactaagttggctacttcagaacacccagatggcccagaaattccagaccattttgtgaataccaaaaggaaaaatgtgatcaggatataattacagccgtcataattacagtcttacagatttaagatttcacatagtttaaatatcacaagatgcagagggagacctaaatgctttatgaatcatataagaaggaaaaaaggaagcaaatcaattatgaagaggtggaggtcagaggatttccaattattgatattgcactgtagggagatggattgagttttgtggtgtagattagatataactaagtcttgaagagtttagttagctgggaaggagctacagtttgagtacattcattttttaaagcactgtactttacaaacatgacatcactgttattgccattttgagatgaagacaactaaagctcagagagatgaaacaatttccccaaagtcacaaagctagtaagtgcccaaacagagatgcaaattccaagtctaactaactccaaagcctacataagagctaaccaaggcagtctttcatatatcacctttacaacttttgccagactatgtaccatctgggctttaatctacttaacatgattctctaaattgatggatttatacttcaaaatgtttatttaaaatggtacatatacaccatggaatactatgtagccataaaaaagaatgagatcatgtcctttgcagggtcatggttggagctggaggccattacccttagcaaactaacgcaggaacagaaaaacaaatactgcacgttcttacttataagtgggagctaagtgaagagaacatatgaatacatagaggggaacaacacacactggggcctatgggagggtggagggtgggaggagggagaggatcaggaaaaacaactaatgagtactaggcttaatacctgatgaaataatctgtacaactaagtgccatgacacaagtttgcctatgtaacaaacctccacgtgtgccccggaacttaaaataaaagttaaaaaaaatgaaaattttataatgctattttattttaattatttttttgaaacagggtctcgttctgttgcccaggctggagtgcagtggtgtgatctcagcttaccgcaacctccacctcctgggctcaagtgatcctcctacctcagccttctgagtagctggaactacaagacacacgccaccacatctggataatttcttatacattttatagagacggagttttgccatgttgccaggctggtctcaaaatcctgggctcaagcaattcacccacctcagccacacaaagtgctgaaactataggcgtgaacctctgtgccaagccttctaatactattattaatggaaaataactgtaagtggcataagcagaaggcaactgtaaaagtaaaagtaaatttagtctagctaaatactgttgcttaccaaagctctgatcctggggccggccttttccttgtaaagagagctccgagaagcagagaggtattagtgaacttcttgcacccaaatgaggcttttctcttgatgtaaacataaggactggaagagaactataaagggaattctattcttgtcgtatgataccgtcctatttgatgccatgtggtgtgccacctgtattcactgtgtcttccacctgtggcatgctggccttgttttgggaaagcatgttcccattggctgagcattttctgtgagctggaccaagagaagatggaagggagtgattggatctaatcatttttttcaaaccaaaattcaacttgaaggaaactagatgcctgtttccatgcatggctcaattaaattttatatataacaaatatgagatcaaactcaaaattaagcatagagctaaaaatcttacacaatgttgatgtctaacagcattcaaacatgttggctctaggaactactggatattgtttaccaggcttcctggataaactatgggatatcattgtacaagccacagcaggcctctccctcttgcaaaactttgccttggagaagaccggctggaagttcttagtgccttgcctactcctgggcaaaccccaatggccatatgaggccccaaagttatttcttagcataattttatcctgggcttctccttacttctatttaaaaacacagaacaacagcatggctattacagtaccaagatcatcaccataaaatactaaaacccaactccatgtgtcaaacagaatgatcaaaagatatttgtgcattcttatttcaaagatattttatttcctaatcttctataatttgactcactagtatgcttattagcgtatataaacttttgcaaaaattcaaccagtatcctggctttttttatagcatgtactctgtctgcccagaaaaaacccacattcatgcattcaagcctactatgtagtacacacacacacacacaattagttgtttgtttttaaaaaactgaatttcagtagcagagagggtaagggatcctaagtggcaaatatatagaaactgaaagaaatgcaaattcagattcatgtcaggaaacagattttcaaatggtgataacattgtacacaagactgtttaagaaaatgcaccagactcattgcaaaaaaaaaaaaaaggctgtttaaatgtcatcttgggaggaacacagtattaactggcaaagcagggtgataacctacaggccctctacatgttccaaatatttagacttctgaggaaatacatgtttattttagaattaggaaagcatactacttatctcttaaaattttcaggaaccagcaactggtttaattattagcagagttccttggccaaactattgcttccaaaaaaggtgatatcctcacatattaaacattcctttttgcaatcctaaggcctggcacagtgactggcacaaaaacactgctaaatgaaaaccatgatgggtaaattagtatataggtgagatcttgctcttaaatacaatataatgtggccagaatttggaaatgtgaagagagagttgatgtgaataccaattgtttcaccttcctctagcagagtaccaatgtaacactcatgatactttctcaaatatttccaatagcatagcctacactttcttagttgacacaattgtttgttctaattttctaaaggtacatttttatgtaaaaggaaaagcataggcatgaaacaatattccactacacacttgtggttcagtaatcattttgctgttttagtgaaatatcctcagagcaactgaaaatgctaaatataaaggaatgaaaacagaaacaaggataataagcaatttctatttctactgaaatctgaaaatatagaatttctgtttttaatttgaagtctagaaataaaaccaaaatatatcttttctatagctgagtctaaaaaccaagttttctttgtaaaataaataggaaaactttttttttaataaggaaaagcattattctccaggttataccattttaatacatctgaccccaatttttagatcttggtttctggaacctgaagcaactggttctctgctgattgctaatttgagggaggaaaatgatcaggaaggaggtaaaatctaagtcagagctcggccttctggatctgagaggaaatgcataaaccaggcaagtgcggagcccacattaggaaactcccaagggggatggtgatgttctgtagttaaaacttaaagtcttctcaattagagaattgagagatagcttctcaattagaaacacctcagttctaagaagatgctgtcttttattcctgaacttgactgcataaaagcaaatgctccctatttctccagttcacaagccttcttcaaatgcaaagcctgggttaagcaccaaagagcaatgtttctcaaactttagagtgaatacaaatcccagagagctggttaaaatgcagattttgattcactaggtccggggtgatgcccatgatttgtatttctttatttttattttttatttttgagatgaagtctcgctgtgttgcccaggctggagtgcaatggtgccatcttggctcactgcaacctccacctcccgggttcaagcaattctcctgcctcagcctcccaagtagctaggattacaggtgcacaccaccatgcctggctagtttttctatttttactagagacggagtttcaccttattggtcaggctggtctcaaactcctgacctcaggtgatccacctgcctcgggctcccaaagtgctgggattacaggcatgagccaccgcacctggcccatgatttgtatttctaacaagctccaaggtggtgtggatgctactgatttgtggaccacacttactaccaaggacatagagaatacacacctgtggcttccttgactttaccatctggtggggaaagtctataagtaaatatgtaaccattgcagtttgactgcacacttttcctacttactgattatctaatatggctgtactataattttattttatttctgcatgaaaacttcttttcatgaatatattgaaacataattgtataaaatcatacagaaaaagaagaaaagacatatctgttatgaagttttactttaaaaaagaaatcaattatgagaaaacaaaaattacacattacaatttcttgactgaaataaatgcaagtgtttcattaaataaagagaaaatcaactccccctacaaacatccaattattcaattaaactttcttgggtaaagtcaacatcaaccagtaatgttgattttatacctatttctacctcctgttttaaagaatcagctatcaaaagataagagtttcctacttattccataaatatttactgagcatcaactatatattaggcactgggctgggtacagaggatagcgagttaatgaatgagggaagccaaacaagaaacaagtaagcaatgaattggtaatagttagaaaactaagtgatcaagatgaagaaccagcctccaagatagcctacaatgatccccatctcccagtattcatttccttgtacagacctcttccaagctaaataggactgacctgtgtaaccaataggatactgcataaatgacagtgcgtgacttctgaggctaggtcataaaagacattgtagctctgccttgctctcttggctcttttgctctgagggaagccagctgccctgtcatgacggtatgcatgcagccccatggagaggcccacatcatgaggaactaaccaagcactaacttgcctggtgtttcaataggccactttggaggcagattctccagccttggtcaggccttcagatgactgcagccctggctgatgacttgactgccacctcatgagagaccttgagccagaaccacccagccaagccactcctggattcctgatccacagaaactaggtgagacaataaatgtttattgtttaaagccactaaggtttggggtaatttgctgtgctgtaataggtaactaatacagaagagaggtgggtgagaaggtgagaacacacctacttaaacaggtggtcaggaaaggcttctttgagaaaaagacatttaagctgagaatggataaaatggagccagctctggggtggaaggtggtggcagtggtggtaggaagaacagcattcccaaacaagaaagctgaatggcagagggaagatccggagttgtatatgggacagtgtggccagagcaaattcctgcagggaaatgggaaagatgaggtcacagaggcggtcttagccatatcaggtatgacttcttgtgaaaagtttaaattatattcttaacacattgggaatcctttcatgaatctttagaagactaatgcaattctctctgtttcaaaaatctcacgtgggcctggagcagtaatgcacaactgcagtctcagctactcaggaggctgaagcaggaggatcactcaagcccaggagttctaggttgtactgcactatgatcatacctctgaatagccagtgcactccatcctgggcaccatatcgagacaatgtctctaataaataatctcacttgggctgtagtgtggaaaggaccactaatgcctggcttactatctacttttcagttatttagaggctcagagaagaatgaccaggaaagatttgaaagtattaggagttacataaatatctaattgttactagtattactcttgctattattccaaactcaggcctggtatggcctctgcggtgttgcaagggaggaaacaaatggacaggagagagcaatgaggattttgctggtttctatagaaccccagaatcctttctgaggcagcctctgaacctcaccaaatccaattccaaatttaggaaggagtttctacttgctaggcaagtagaacaacatcaaaatgttgatgaataacaaacacaaatgcatagtacaaatatttacttttggtgtgggcatgatttttaaaaatatataatttttaattatgcagataatattcactgtagaaaaatccttgtttattacacacataatattcattgcaaaaaattaagaaatgtaaatgtgcaaaagagaagaaactaccaatcacccaaattacacaagataaacattgttttcatgttggtgagtatccttccagtatccctatgcccatatgtaaaatatactggctaaacctaagattttaaagacttttccttctctattataaaaaccataaattctgatgttaggcaatttgaaagacacagaaaatataaagaagaaaatagatggcatgaataacactacctctatttctttctgagaatctaaaggtagcactggcaatctatccaagcctgcagctgttactctgagctgacattttctacaaatattcatttccttaatttcagcctacctttttacctcattagaaaaggaaaataaaagttgaagactgttcactttgtaggaagttttggaacttttttttttttttggagacagggtccccctctgtcacccaggctagagtgcggtggtgcagtcatagctcactgcagcctcaaactcttgggcttaagggatcctcccaccctagcctcccaagtagctgggactacaggcacatgtcaccatgcccagctaattaaaaaaaaaaaaaatctcagtaaaggcagggtctcactatgttgcccaggctggtctcaaactcctgggctcaagcgatcctcctgccttggcctctcaaagtgtctatattacaggcatgagccactgcttccagccctggaaccatttttataactcacaatgagataagttagaggggtgggaaggaaaggtgttgtgtgataacattgggaaagaattcccagtgtttccttcttaccacaaactctaaccaatcctaaccctttgaaagatattataggggcagcgcttgaaaagacaaactaaatgttaatgattcacacaataagagtgctcaaactgaattttcaacctcaaaacaaaacccatctggagaagtgtactaaattctgattgttttcattactcgggcttctcgcagcacttttttttttttttttttactgacttaaatctaactttgaaatagaaattcttctcatggacagtagccactcttactttcatatggcttcctagacttccctgcaaagtcttttgctgctgttaggcaatcacgcagaatcacaagtgctgtgggctcagagaaacttcagtctcggtggtaatcttgactactttattgaacaacggaaactcatttgctaaatggaaagtattgtagcatatggtgccattccaaccaaggtttaatccatttgaaagcagactttcaagaacataaacctatattttccttctaaaaagagtcactttacagttgaatttcacagaaattttaaacccttgatccacagccaacactgacatggttttactcctctaatacaacagttacctttctgaattcactggaaacatttttagccaacaaggtttaacagacacatgatcttaatgtatctgaactctggaaaaccaaaagctgggaatctggaccatactgtaaaaagtaatctgagatgccagtgagtgtggagtaaggggcagagaggcattaagcaaacacacgaattagggttttatttatatctttgattataaattagatgttttgtctagattaaagccattaatatgcacaggtatgaaaaatgtgtttgaatgtgatatggtctgaatttttcacatttaagtatgaatcaagacaacacaagaataatatgggatacacagaagaaccaagacagaaccaaggctacctggttaaaggttatttccggttccacagcaaaagaaaagttaggacacataacataaatcattacatactatttatgtatcatttgggtgctgtcttagtccacttgtgctactataacaaaatacctgagactggataatttataaagaacagaattttactctcacagttctggaggctgggaagtccaagatcaaggtgccaagatcttccagatggtgccctcttgctgtatactctggagaggccaaatgctgtgtcttcatatagcagaagagatggaaggccaaaaggcctaagctagttccctttagctcatttataaggaatcctcattactttatcacttaccaaaaggccctacctcttaattagcaccacgatgggggttaagtttcaatgcgaattttggaggggacatattcaacccatagcaagtgctatatgaagtttataatgaattttcaatagttctcactacactatatggattcagtcattcttaacactctctgtgttatcttcataatcttctatggtaatgaatatattccagtattatgttaaacataaaatggctgaattaaggtagattatattcaactatttagaatcaagattctgtacatgatcccttatttcagattctgtcaataaggtctttttctataatgaaataaaaattttattcccctaaaatatctcttaaagagagtgcagcatttccttgcaaggaatgcttttataattcacatatggtaaaagcataagatgctaatgtcatgtttggcaacaaaaatggttcctaaatttcaacatataatattaggagagaaatttgcatccctccaacaaaaaagaaggaagcagacaagagtaagtaagcagcggcattgcttgggagaggggtgtgaaggtacggagaaaagcttcagatctgggataaaggaggatctctagaggacagaagtatcaaatagaaactcctaagctgtttgcttgaaaagataggtatgtgtgtgttggggggtgggatttacatttaacataaatctcagctgggcgcagtggctcacgtctgtaatcccagcacttcgggaggccgaggcaggcagatcacctgaggtcaggagttcgagagcagactgaccaacatggtgaaacactgtctctactaaaaataaaaaatttgccgggtgtggtggtgtgagcctgtagtcccagctactcgggaggctgaggcagaagaatcgcttgaacccaggaggcagaggttgcagtgagccgaggtcgtgctactgtactccagcctgggtgacagagtaagactcagtctcaaaaaaaaaaaaaaaaatatatatatatatatatatatataaaaatctcatcctctatgtactctttccttactaagatattgcctaccaattcttttgtgatcatagattcatcactaagttccaagtctgggttgcaatgaggagaaaacagagctggaattaacagaaacaaaaactgaaggacaaagagcagctgacatttgggctttttaagtaataattattaggttggtgcaaaagcaatcgtagtttttgccattaaaagtaatggcaaaaagcacaattacttttgcaccaacctaacattattatacctcagtgtggaaaatatgaggaatatttaggaaaaacattaggaatacctaatagtattattcctcagtatgaaaaataaatctgacacatataaacatgaaataagatgtaacaactaacaaatgattattcttctcaatacaagtataattgacaccataattcacagatctactaatccttttctgcctttgtacctggcaacattcacttcttgagctaatgtaaatgccagtcttataaatacgacttacctctcccctgagagaaataaatgacatagtaagtgttagattagaaaggaagaggtggagagggttaggtttgaagagggactggccatctgagaattaaatgagatgatgctggcaaagcgcttctactgatatcctacatgtactaaacacttagcaaacgtgaccagttattcataggaataatcgtaggaacacattaattccttctgcctgcttctgtctctagggaaaggttttgccctgatccatgacagagactattacctaaaagatacaagtgggacagggctagggaagagattatccctctgccccagaagaatctactgagaagttaatgtgggatccacctctcttactactaatggttttcctcttcacttttaagtctagctgaaaacaacctccagcattctcggcaattaggatgaagtctctgggtttcaaatgcatctctgatagatgcctctaactgcatcaacgtggcagatgcatttctctcagcatttaatgctaatcctccttgttgtctaaggataaataactgcacaatcgtgtcaggaggccccaacataaattcaccaggggttttaattactctccagtgacaatatctcatacaaaatcagagaagtgaaaatccagtcagtgtgtgtacatgtgtgtttatgtcccaggctatccccagaacagtctggggatcatcatttctgttccaatagaggaataagaccaggaacccatgtccagttcagatgtgtgagacagcactgcaccctgtcgaatgggtccgaagaacaaatgatttcccaatgacactgcctgcagcatccctccttcccttgggggcacataaatgagtagctacaaactcaagctgtggagtcaaacaaacctgggttcacatctcagcctgctacatgctcactttttcatgccaggcaacctctgtaatcctcaaatttctcacgggtaaatggggatcatacctatatatgcagcataaagttgtgaggattaagcaagataatctatgcaaaacaagtgacacaatatgtagtgtacggtaaatccccaatgaatattagcaacaccaaaagaaatgcagagggagttcctgtccctttgttgcagaggacatgttgctatgagggtccaggtgttcttcctcccacccaggcctctagttgggtgaattggaagaagagcatcttatctcccacctgggcctaagagtaaagatggtgaataaactatatatatacacacacacacacacacagaaacatatatccacacatacatatatacacacatacatatatacatatatgtatacacacatgcatatatacgtatacacacacatatataaacacaactgctgtagatctcacaaatgaaaatgctaatgtctgcaagttcattctatacataacttttataaatccagaaagccatacaaactagtttcagaggattatctctttcaaagaaacagtccaacaaccaaaagtaattaataatagatacaattctttatttaaggtctcatacttcatcaaataatctactggcatactttttaatgtccctttgctttctcctcttgaaatccattatactatccaactgcaatggaacttctctcctccctaccccatccactcacctccagtccatccctttagtgtatatagatcagcttagcctctcctccagaaagcagggctcccttctacttagaagaggggcaggagaggaaaactgagtgatctaaaacataactgtccttggtgatcatgaagaagggggcagcagtgcagtcatctaagtgacttttgcctctgtcaaactaaatttggcctgaattacataaggacagttgagtcctcatgtaattaattgcagtctaacttagcacataaactaactgaaagcctaacttaggagtatagttttgtaacaaatagctgagtctcagtcaatcacaggcagccagctgatcagaccatattcaaataaggcaaatgccaagctgtaatcaatcaagtttctgtacctgacttttgtcctgtccataaatgctgccgcccatgtaatggagcagagctctctgaaccgcttctggttctgagagctgagtgattcctgaatcattctttgctcagttaaactctgtgaaatttaatttgtctaaacttattcttttaatacctctgcacatacaaaatacaagaatacattcctgtaccttttttctccctcattcttaattcatgactttattttcaaatacaaagatgcaaagatagaaaaccttactaccccaaagtaggaagtatgtttcctatctctcctttgccttttcttcaaaaacgcaaaaagtcattaagatgttaatgctgagataagtcattggaagaaggatggaaaagaaactacaagaaatgatagacatggtgctgccaagcagctactctgtttttataaaatacttcagacataaatggcatttgtattctgtgacgaaaacccctcttcccctcccctacacaaaaggaaaggcaaagaaatgcaaaggaagtggtaattgccaggtgtctagatatgggaccactgccctctagtgtacttgaaatttttctaaatccctttatcagagatctttacctgaaagatagtaggaaacagaataaaacatgaacctctgttgaactatccaatagaatcattttaaaaaatactgtcaattattaggagagtgatatgacggcttcctaccacctcactatctgttggtgccaacactttcttcaggtcctacacatggacctgaacaaggtttcagtccaacagattgccaaagggcagaagaaatattaaaagtatttcacaactagtgtggcatacgcactagctaaccagaacagatgcccggaagatgccagctggcagcaattctgcctcttccctttgcagggccagcattaaccccttagatgctgaactgtggagaggttctgggttcctggcagagggactaggtagccaagagagtagggggtctgggacaaaagcatgtcaatatttcaacgatctgtactgtggtgttctggctgaacattcactctgctaagaggattagaagacatcagaaaaataagccagtaccgctgagcagagcagaagagtgactcagcgtccactagcaaagatctgaagtagctcttcctcccagcagctgttccttctcttgccaataaccagggacatcctctagaccaggacaggggtatagtagtgttagtagcggatgtcaggaaatctaccctacagtcttggttctactacttttgtgtgtccttaggtggatattttgatctgggcctccatatccctgtttttaaaataaaaaggttagactgaagtttttcaaggatccttctctctgtaggtagaaattattatttttttcatgatctgcttttttgtttgttttgttttgttttgttttgttttgttttgtttttgagatggagtttcactctattgcccaggctggagtacagtggtgccatcttggctcactgcaacctctgcctcctgggttcaagcgattctccttgcctcagcttcccgagtagcttcgagtacaggcacccgccaccacaacccggctaatttttgtattattagtagagacggggtttcaccatgttaaccaggccggtcttgaactcctgacctcaggtgatccgcccacctcggcctcccaaagtgtgggattacaggtgtgagccactgcctctgactatgatctggtatttccaagtgaattctacatacaagatcattcagcataatttttaatgacaataccaccttgagaactcctgatgacaacaacgtcatcttgagacagctcttagactataaaaaagtgatcagtaaatatttcgaaatctccttgaaagatctcatttctttagaatttttttagtttctatttccaaatactaccccaaatgtagccacttgtaagtaactttcttttttgatgtttcctttattttttgagacaatgtcttgctatgttgcccaggctagggtgcaggcatgatcatagcgcactgcagcctccaacttctggccttaagcaatcctcccacctcagccgcccaagcagttggaactagaggtgtgtgccaccatccctggctataaataagtattttcctaagatttacttaattctttgagttaactggcaagataataaaggtgatttaaagaaggatagaagaggccagggacagtgacttatgcctataatcccagcactttgggagtctgaggtgggaagactgcttgagcccaagaggtcaagactgcagtaagccagtgcattccagcatgggtgacagaatgagaacctgtctccaaaaaaaaaaaaaaaaaaaggaatagaagaaactagtacatataaatccagtagaaaaaaataatgctggcataggactgcaaagttagttacaaaatggttgccgttttactagggccaataaaatataacatttggggttaccttccatgctgggcaaaagtagtttgtatctctaccaaacaaaagtcatcagtaacttaccgatcttctgcaaattaacatccaaattttacagattctagacttcaattaatagcaaatagccaaacaaagctacacctcctgaaatatcagctgattcttagaggatctaatacgactttgaaagagcacccagtaatctttttgctttatttcaaaatttctgaaaactcttcttaagaattttcaaatcccttgaccctgaaacatcaaggtagcagatctcaataagagggagaataataaggactgtgggaactgaaaagtgtaaaaacaaacaaaaaaactcctcggtattttatggttgatatgaaaaaagggggaaacaaaccaaaaactaatgtgaaacacaagaagctgatcaagtgtttaaaccaaaaagaagacctctgtctctctcaccactactacaccaactcttattcacacaccttttaaagatgtttctgtattggatgaaacgtgtggatgtgcagtattctccaaagtaaccaataatgttgtatcaagtttcagttaataacgactatattaataattttgatcatatagcaaatgagcatgataatacacagttttaattcgattttcaattcacaggtgttaaaccagcctaaagtaaaaaggctgcttggagtttttgactgttggatacacagaggagcaaaacttgctatgtcagttttttaattcgcatgattttatttgcacaactcatgactttttttctcctttaaaaatgtaaattacttttgcaaaaaagcattaaacacaaaattaagtcttaaaatgggcaaagttgaagccaagtcatccaaaggaaaagacagccttgagcagcagggtgcagaatacagacattaccatcttcatctgcatagaaatgagtctgactgtgtttacagcttcatcatttgaaatgttacagaaaaactcatgaaacagtgcacttccccacagatagctggtatgttagataactaaatgcacaaaaacaaaatgtctttgcttcatatatatttatatatatatgtatatatgtatatatgtacatatatgtatatatgtatatatgtatatatgtacatatatgtatatatgtattcacatatacatgtatttatatatctatataaatacattataaatttatatatctatttgagggaagacaaggagacaaatgattacttttacttttcatcaactttctgttatgcacatggcttcttttatagtataattaattttagtgtacatcaattaatacttttattaataaaaataaagctaataatactttaaaaaccaagtagtatagctgacagaatctatctagacattgctatttcattcagaaatttatctctgctgtatatagaaagtgaaacttctgttatgttttatgttttagaatatttatatatattatatatatattatatacactttttggggggatagggtctagttctgttgcccaggctggaatgcagtggcgtgatcttggctcactgtaactttcacctcccgagctcaagtgatcctcccacttcagcctcccaagtagctgggaccacagatatgtgccaccacgcccagctaatatttgtattttttgtagagacatggtttcaccatgttgcccaggatggtcagactcccgggttcacgcgatctgcccaccttggcctcccaaagtgctgggattacaggcataagccaccatgcccggctgtattacatatatatttacaatacacatttttaaaaaatcagtctcaatcacttggaagtgacaattcaaggttctgatttctgattttttttttttttttttgagatgcagtctcgctctgtcgcccaggctggagtgcagtggcgtgatctcagctcactgcaacctccgcctcccgggttcaagtaattctctggtctcatcctcctgagtagctgggattacaggcacgcaccaccacacccggctaatttttgtatttttagtagagatgtggttttaccatgttggccaggctggtcttgaactcctgaccttaggtgatctgcctgtctcggcctcccaaagtgctggcattacaggcgtgagccaccgtgcccagccaatgttctgaattttaaaaaaatcaaccctatattctaggccattccttagcccttttctcaaaattccaatattttatttgtcctatcccaattccctgaaaatctaaagggtgacaagcatgctctatgctgaagaattttttgttctttgactctgaacaatgcccagaagagggtgctcatagaacaatcagccttgctttaaccgcaaagctagcacacatcctctagatcaaagtttggtaaccccaaatttggcaagtaccataatgattgtagtgtgttaagactgcagaaggagaaatgaaaagttccctatattaaaagcaattcaagaatacattttaaaaagttggtgaagaccttttaaatgagggaagacagagacaaatgattacttttacttctcatcaactttctgttgtccacatggcttctcttctagtataattaattttaatgtacatcaattaatacttttattaataaaaaataaaacctataattaatactttaaaaaccaagtagtatagctcacagaatttatctagacattgctatttcattcaggaatttatctctgctgtatctagaaaatgaaacttctgttacgttttatgttttagaatacttacatatgttactactcagaatccataacattataatttatactagcattatttcctggtaatacaaatctttgtagaaaaaatctatcagaaaacaggcagtacatctttcccactgcataccctctttaccagactcttaaaatatctcatattgctttacccatagttttatgaatagggcttagattacactgagttttgctgctgctttgtggtgacttggtactaaattcagctaagctggaaccacattccccagagttctctttcttgtatggttctgtatggccatgagagacattctgtgtgaaatccagaaggaagaagtaaagaagtcatactttttatgctctgaaacttggtacagagttactgtcgtagtctgttttgtgctgctatcacagaatatctgaaaccgggtaatttataatgaatagaaatttattggcttatagttctggaggctgggaagcccaatattaaggtgctggcatctgtcaggtgacttcttactgtgttatcacatggtgaaagagtgcaagggcaaggagaaggtgagagaaaaagaaagagagagagacagggagtgggagagagagagaggaacctgtccttttaaaatggcaccaatcccacccatgagggtggagccatcatggcctaatcacctcttaattgtcccacctcttaatactgttataatggcaaaaaaatttccatatgaattttggaggggaaaacaaaccatagcaggcactatgcaccttgtccacttgcacacattattgctaatctgctgcttaactacttggtgtaccaggcttgcagtaattctaattcactaaatctcctccttcagcttctctgagtcctgggccaagtgtgtgtgcaggagacacactgcaggagatagtgccagtttctcctgcaggtcacccgcagcatcaaggttggacatggtaagacacagaagagggttccagtttgtcctcaatggtcccattggtcctcatgagttctggtttgtccctactctcctatacatctagctttccctcttaacagctgatctgacaaacctatagtaacttcaggctcagcactagacacagaaccaatagtcttcatagattgcatcaccagctctcacatttgtgtaaggtctagcccttaggataataaatctcttattctgtataatgtgtggccattttgctacttcgataaaaccatggctgctgtaagtatctgtgtacaacactgtcttgttgcctttgcattgtgaacggtatgttaagcctcatggtatccactgtcttaggtagaaggagaagactggtgattggtggtagaagaaaaggaagagatgcttagaaaggtaaaaagcttatgtaggaatctctcaggaaatcctcaatgctaaaaatgtctgtgctagttatcatttgttgcttctcatctccaaatccagctttctttgtcctgttttgtggtcttggagctggaccatgtaaacatttctcctttgtcaatagagggtgctggagggacactgtaggaagaagggaactcagcttgactctcgtggcttgactgctgtgctctcccctgctagctcttgtggtgggtaggcgccagcagcataggacatctagtgactcaccctattaagttttagtggcagtatttgggggacttttcagtgggtttgccaccactccagcaggcagcttcccagtgaatccctctggcacctcggaggacacctcagtgatacctgatgagtcttgcagatgccccaatgggtggtataccaggaggctggacgaaggttcagaagtttggtttcctgcttgccagccctggcctgcaacatctcagggaaattctctgcaattcagtgggctgcagactttctttgaaaggggtctgaatcagccctgggtgaggggagggccctcttccaaatttgttccttctttggtactctttccttgggaacagccttaggggtagtggctgttcttcgtatgtgctattcctgtgttcagtacggttttctttacccttagtaggtaatcctctgctactagttaataatcatttatattaaactttccctgtgtgaattactgtgtgctttctgtctcctaactagacactgataaaatgccttttgctcttagtagctatttaaaagaaaaataataaaacttaattttattagttcaagatttttccttagaagggacataaattacttttaatgtgattatataaataaagggattgcccaaatgtgcagtttcaagagactatttgctttctttggccacctgggaagggtatttctcaaatcgggctctacagacccttctgagtagaccctgagtcactatggctatgaaacaaactaccgcaaacacaatggttaaaacaaccatcatgtatcactctcacgtatctgacagaaggactctagagttgcatgacaaatggtgaagacacaggacaggatgaagaactggggcccaaaatgtactctaccacagggtccaagggcattaaaaatgggtctgtgaattcaaatggtatttttaaagttttacttttccatttggtgaggaaataaatagtgtaatcatagtcataggacttcagtgcctgcatttgcattcatggttcagttcttgccaagggatcgccttaagtgagtgtgcagaggaaatgttaggcagtgttccctcatttctaaagcttaaccagtaaagtaaaaagagggtatgtatatgactgtggggtatgtgagagctctctgtgccttgactcccctgaagagccaacttagagaacctggctgtgggaaccccaagggctgagctggcctccaatcaggagagacaggagaacagaaatcagtccaggaggttactggagaagctgggaaccacagagtcatacagagataggaaacagccaactcccacagttttcaatagcagatttgctgcagaaaactggtcggccatgaacctggaaccctccagagaaggtaccatcaaattttgatctctgtttaacactgatttctgctataacccatcctgttatggcaatgtctgtcttgagaaaaggctgagctgatatagtacagaggagggttcaacttgctgcaaattatttgaagcaggcatagcctaagtccaggcctatgccagagaaagatgacatattcactgataatcgcctaatctcctgagcacataggagggcaagattaggatagttagagttctactcaaactgtgcaagaatgtccttgaagtgtggccaagtgacaaacagtgcaataactatgaatgtttttacagattttatgagacattatcataccctagcagtgactgtgcatgtttatatgtttttaataaattttttattttataatagttttaggctaaggcgggtggatcacttgaggtcaggagttcgagaccagcctggccaacatggtgaaaaccctgtctctactaaaaaaaaaaaatacaaaaattagccaggtgtggcaggtacctgtaatcccagctacttgagaggctgagacaggagaattgcttgaacctggaaggcggaggttgcagtgagccaagactgcgcaattgcactccagcctgggcaacaagagcgaaactccatctcaaaaaaaaaaacaaatagttttagacaaaatttgcaaagacaggagagagagtaatcatataccccacaaatagtttttcctacttattaacatcttacattattttggtatactagtcataataaactgatgttgacacactattattaactaaagtccatattttatctaggcttccttagtgtgtgtgtgtgtgtgtgtgtgtgtgtgtgcgtgcatgtgtgttttactgtaatgtcctttttttctgatccaggatcccattgaggatatgcattccatttagttgtcgtattttcttaggcttctcttagctggacagtttctctttattagactttccttgtttttgataaccttgacagttttgaggagttttggttacgtattttgtagactgtcatttaattgggatttttctgatgattgtattttaattattgttgccatatttacaattgctagttccttcaaacatcccaccaaaagtgtcagaattagaaagtgtgcctcaaacacagagtttgaaaaccactggtctacatcaaagcagactgtaaatatgcataagtcaaggttattgagatgcttagtctaccatttgaacttcagtttcaaaaagccaggtaggcttttagacctttcccacagtggctgcatagcaatctcaatttgtactgtctgcatgtcacccaaaatggccaggccatcggccacccgcctcatttggcagccctgacttagaagagaagacaatagctctttgcccaaaggtcgctttgtagtgactcaccttgaaggaaaaaggaaggtaaattacacataatggccttctaagttgtcccacagttttcaacagaaaatactcttaaagtataaccagaaacaagaaaccttcaatgcaatattttcctttttgttttccaaataagtaaagtccaaattaggaaacagaagcaagtatatcctattaatttgtaatgtctagaaccatagaagtagtctagttatggaagagctgttgtgcatcttctagtaattaaacctgtgcaagttacagccttaatcaaaacaccttttaggagtctactctggtctccatgagagtgaagtccctaagtgctggcaactttggaacactaaacattactggcaatgctggaaatggtacaatatttaccgcaataaagaagacaatacccgatatgtcccctggagcacaaaattaaaatatttgtattggaatacagacaggccgaaatatgtattccatgaaccaaaaagtactcactgtgttggccagctctagatagcttcctcctacagagttgccaatgtgcggggactgtgtgagcagtttgtggagagcagcctgctgatgcaaagagcttccgccatactcgagcagcttctggagggctgactggctctgcacatccgggctctggaggtccctggcaccagagtcgtattcccagctctccctggctgctgataaggcacctaagtccgagagaagcagagaaaatgaaaagacatttccttcattagcctgtgggtggccaataggcaatgatttggaacctcctaagccttccatgtgccagcatctcagaacacatgtgatgcccaggctgcatgctaagcgctttctctttcaaactgacacatggggagcctggagataaaagcaatttcaggcaaagcattcaaaaacaactgtcccatgaatatgtgctccctaaacagaaatgcttagcaaaaaaagcactggagagccaagtaaagggaatccagatcagagtcacatctgtgatttgcacagggctactacattagccttagcactggtcattctttctcccaactgaggaaaaaggaagcaagaagaatgacaggaagttaacatatggcactttatcatgactctctttttctccttccttccttcctttccttccttccttccttcctctctgtctctctttctttctctgtttctttctttctttctttttttgaggcagggtcttgttctgtcatccaggtgggagtgcagtgttgtgatcacggctcattgtagcctcaacctcctgggtcaagtgatcctcctgcctcattaaaaaaaattttttttgtagacctcatttctatactatgttgcccaggctggtcttgaactcctgggttcaagaaatcctcctgccttggcctcccaaaatgctaggattacaggtgtgagccactgcaaccgacagtatcatgactttctactgttgatgtactcttacctgaaggaagctagactgtattttccagttagggatagcaatgaagctgagttctgggcaatagaatatgaacagaaatgataagcatcactgctggaccttgcttataaagccccacagtgtgtgattctccatgccctttgccttctggcctggttcagatgggaatggtacccttggaaaccatgtggtacagatggtggagccacaaggtagatggaagatgcctggattccagaatcatcacttgcagaagaggtgtctgctcatcctaagtaccctattttgccctaacatgattagaaaagaaaacttttttttacatgttttttatttcataggtttttggggaacaggtggtgtttggttacatgaataagttctttagtggtgatttctaagactttggtgcacccatcacccgaacagtgtacgctgtgcccaatgtgtagtcttttatccctcacccccccactcacactttcccccaagtccccaaagtccactgtgtcactcttatgcctttgagtcatcatagcttagctcccacttatgagtgagaacatatgatgtttggttttccattcctgagttacttcacttagaataatggtctccaattccatccaggttgctgtgaatgccattattttgttcctttttatggctgaatagtatttcatgatgtatatataccacattttctttatccagttattgattgatgggcatttggtctggttccatatttttgcaatagcgaattgtgctggtataaacatgtatgtgcaagtatctttttcatataatgacacttccctctgggtagataaccaggagtgggattgctggatcaagtggtagatctacttttagttctttaaggaacttccattgtttttgattcactacatacttttggtttgttgattagagcagctagtattaccttaattattacagacgattagaaggtaataaaacatgctaatagttataatacaaatgggaaagtgcaatgaaaaagtagaactaaaggaaggatatctaactcagtccatctggagatgaatggggaatgttcagggaaagcttcctggaggagaaagcctgatgcttgagttgtcactctttccagaaaaaaatagatttgaggtaaacctgtttccttgtgttgttcacttcagaatggaaatgtcttgtgggtgcatctggttggtgaagcctaggctgcatgcctctagctgcaaggaaagctgggtaaatgtgttttctggttttactttagagaggtagtattgataaggtgagacatttcctaaacagaagggtgctcaaaaggcctaggcagccacaacacaaacaacggtctatgcacaggacgtgtactgggtcctggggatatagcagtaagcatgagaaattatagtccctgcctgcaaagatctcattctggtaggtctttaatacatggcttttaatgacaaaaaaaaggacacaaaatgatccagtttgtactatgaaatgagaacatatacagattactctataatttacttgagaataattacatacagcaaactgcagtttgtgtacagtgagttctgatatgaatgtccagtctcctcttatcaggtattgatgaatttaatcaatgtgaataggaaaactgtcttcagatggtttccccttactgttctggctctactgatcctctccagtcggtctaacccaacattctttttatacagtgcctttatagctgggatgcatcaactgttttgtatcaaagcaggcaattctgtcactatatttgcaattgctccaagtttactttaatgttaaagtctattgattgtattgcaaggcaggttcttctttccttaacatagactgccaaatgcctgctctccctccccttgttcctctgaacactgtctgttatctgcctaaatgcctcagggcctctgttctggctccagcaacatgtggcaagaagactaacagaggtcagcgttgaaaagtggagtccccacattggactgagtcacagacggacttatatctcatacataagacaaacagacagagggctgggccttgccttatatgttcaccacagtactctcagcaccgtgcacatggcctgtgacatagatagcatttaataaacatttattgaatggattgctgaattatccatggttgtagtaccctacagtttcactttttaacctagaaatacaacatgggaattaagtcaaaataaattatacatttaaactttttctttatgcaaacatgaagcctcattctcaaacaggaaaatataacagttctgaggtggagcaagatggctgaatagaagcctccaccaatcatgcccctgtgcaggaataccacattttaacaactacctacacataaaaaagcaccatcataagaactaaccatcaggtaagcaatcacagtacctggttttgacttcctctcactgaaagaggcactcaagaggtaggaaagaccgtcttgaatcaccaacaccactcctcccgtactctccagcagtggttatgtaccatggagaatctgtgcttatgggagagggaaagcacagcaagtgggggacttggcattgaactcagtgctgccctgtcacagcagggagccaaactgtgaagacctcagtcattgcccacccatggagggagcatttggatcagccctagccagaggggaattgcccatcccagcagtcggaacttgagtttctcagcaagccttgccaccgtgggctaaagtgctctggggttctaggtaaacttgaaaggcagtctaggacacaaagactgcaattcttcctaggcagatcctagtgctgggctgggcttaggtggactagggcagcatatgacctgtgagacatcacccgggttggctaagagagggcttgcattaccccacctcagtaaccccaggcatcacagcttgcagcaaagaaagtgacttgttccttctgcttgaggagaggagagagaagagtaaagaggatttggttttgcatcttggaaaccagctcagccataacaggacagggcaccaggcagagtcatgaggccccccattctaaggtctagcttccagacatttgtagacataccctgggccagaaaggaaccttctgccttgaaggaaaagacccatttctggcaggattcatcacctgctgactaaagagtcattgggccccgaataatcagtagtagtagccaggctgtacttgccgtgggccttaggtgagactcagagctatgctggtttcaggtgagtcctagaacattcctacctgtggtgtctacagtgaaagactccttatatttgagaaaagcagagaggaaagtaaagaggactctgtcttgcaccgcaggtaccagctcagccacagtggggtagagcaacaagcaggctcttggacagcatttctggacctgccccgggccagaagggagcccactgccctgaaagtgagtcccaggcctcacagcattcaccaaaagctgactgaagagcctttgcactttaagggaacattgacaatggcctggcagaactcaccatgggtcagtggtggtggccactgagagaggctcctctgcctatggaaaggggaagaaagagcaggaagaactttgtcttgtggtttgagggccagcatagccatattagaatagagtaccaggtagattttacgttttttttttactccaatccctggctcccagacagcatttctgacctgcccagagcctgggggagctcactgccctgcaggtgagcacataatcctggctggtttcccaaactgctgactataaagccctagggccttgagtgaacataggcagtagccacatagtggttacagtgggccttgggtgagatccagtgctgtgcagacttcaggtccgactcagtgtagtcctagtggtgggaaccacaggggtggttgcatcaccacactcccagttctatgtgtctcagcacagggaaagagaggcttcgtatgtttgggagaaagtaagggaaaagaacaagagtctctgcctcgtaatctggagaattcttccagatcttatccaagaccacaaaggtggtacctctaagagtctgaaaaatacacagtattattgggcttggtgcccaagtccctttggatactggaaggccttcccaagaaggacaggcacagacaagcccagactgtgaagactacaataaatacctaactcttcaatgcccagacactgaataacatctacaagcattaacaccatccaggaaaacatgacttcacccaaagaactaaataagccatcagggactaatcctggagaaacagagatatatgaccttccagacagagaattcaaaataactgttttgaggaaactcaaagaaattcaaggtaacacagagaaggaatttagaattctatcagataaagttaacaaagagtctgaaataattaaaaggaatcaagcagaaattctagagttaaaaaatgcaattgacctactgaagaatgtatcaaacagatctctctccctgtgctgagccacctggagcttggagaggggtgacacaagcacagtcagaggagacaaaagaaaaaagaataaaaaaaatgaagcacgcctacaagatctagaaaatagcctcaaaagggtaaatctaagaggtattggccttaaagaggagatagagacagagataggggtagaaagtttattgaaaggaggtggggcacagtggcttatgcctgtaatcccagcactttgggaggccgaggtaggtggatcacctgaggtcagaagttcaagaccagcctggacaacatggtgaaaccccatctctactaaaaatacaaaaaaaattagccaggcgtagtggtgggcacctgtaatcccagctacttgggaggctgagcaggagaattgcttgaacctgggaggtggaagtcgcagcgagccaagatcatgccattgtactccagcctgggcaacaagagtgaaactctgtctaaaaaaacaaacaaacaacaacaacaacaacaacaaaaaaaacaacaaaaagtttattgaaagggataatatcagagaacttctcaaacctagagaaagatatcaacattcaagtataagaaggttatagaacaccaagcagatttaacccaaagaagactacctcaaggcatctaataatcaaactcccaaaggtcaaggataaagaaagtatcataaaagcagcaagagaaaggaaacaaataacatacaatggagttccaatatgtctggaagcagacttctcagtgtaaaccttacaggccaggagagagtggcatgacatatttaaagtgctgaaggaaaaaaaaaaaaaacccttttacactagaatagtatatctggtgaaaatatccttcaaacatgaaggagaaataaagaccttcacagacaaacagaatctgagggatttcatcaacatcagacctgtcctataagaaatgctaaaggatattctttaatctgaaagaaaaggatattaatgagcaacaagtgctcatctgaagatataaaactcactttcaatagtaagcacacaggaaaagacagaatattataatactgcaattgtgatatgtaaactactcttataagtagaaagactaaatgatgaaccaataaaaaataatgactacaacaactttttaagacataaacagtaaaatgagacagagagaaagaacaaaaagttaaaaactggggggaagatgttaaagtgtggaatttttattagttttcttttcgtgtttttttgtttgtttatgcaatcagtgttgttatcagttaaaaataatgggttatgtatacatatgtaacaaacctgcacattgtgcacatgtaccctaaaacttaaagtataataaaacaaaacaaaagtaatgggttgtattacttgcaagccttgcggtaacatcaaatcaaaaaacatacactgaatacacaaaaaataaaaagcaagaaattaaaccacaccaccagagaaaattaccttcaccaaaaggaagacagaaaggaagaaaaacaggaagagaaggccacaaaataatcagaaaacaaataacaaaatggcaagagtaagtccttacttaccaataacaacattaaatgtaaatgaactaaactctataatgaaaagacagagtgcctaaatggataaaaaagcaagaccaaatgaccaaatgacctgttgcctacaagaaacacgctttacctataaagatacacacagactgaataaagggatgaaagaagatattccatgccaatggaagccaaatagtagctctacttgtatcagacaaaatagatttcaagaaaaaactataaaaagagacaaataagctcattatataatgataaaggggtcaattcagcaagaggatataacaattgtaattatgcacccaacaatgaagcacccagatatataaatattattagagctaaagagagagagagatctcaatgccataattgcttgagactttaacaccccattttcagtgttggacagatcttccagatagaaaatcagcaaagaaacattggacttaatctgcataatagaacaaatggacctaacagatatttacagaacatttcttcaaggtctgtaggatacacattcttctcctcagcacacagatcattctcaaggatagaatatattttaggtcacaaagcaaaagtattaaaacattcaaaaaactgaaataatatcaagcatcttctttgaccacaaaggaatacaactggaaatcaataacaagaggaattttgaaaatcgtacaaacacatggaaattaaacaatatgctcctaaataaccagtgggtcaatgaagaaaataagaaagaaatggataaatttctcaaaacaaatgataatggacatgcaacattccaaaatctatgggatacagtgaaagcagtactgagggaagtttatacctaccaatgcttacatcaaaaagtagaaaaacaaataaacaacctaatggtgcatctaaagaactagaaaagtaagagcaaatcaaacccaaaattagtaggaaaaaataattataaagatcagagcagaaataaataaaattgaaataaacgaaacaatacaaaggatcaataaagcagaaagttgggtttttgaaaagataaataaaattgacaaacctttagccagactaagaataaaaaaagagaagactcaaagaaatgatatcagaggtgaaaaaggaaacattacaactgatactgcagaaattcaaagggtcattaggtggctactatgagcaactatgccaataacttggaaaacctagaggaaatggataaattcctagacacatacaacttaccaagattgaaccatgaagcaatccagaacctgaacagaccaataaaaaatcatgagcgtgaagccataatgaaagtcttccagtaaagaaatgctgggacccaatggcttcactgctgaattctaccaaacatttaaagaactaatgccaatcctacccaaagtgttcaaaaaaatagaggaggatagaacacttccatactcattctatgaggccagtattatcccgataccaaaaccagaaaaagacacatcaaaaaaacctacaggccaatatccctgatgaacactgatgcaaaaatcctcaacaaaatactagcaaattgaattcaacaacacatgataaacttcattcatcatgacaaagtgggatttatcctgtggaagcaaggatggttcaacatatacaaatcaatcaatgtgatactcatatcaactgaatgaagcacaaaaaccatatgatcacttcaattgatgccaaaaggtatttggtaaaattcaatatcccttcatgataaaaatcctcaaaaaactgagtatagaagggatatacctaaacataataaaagctaaatgtggcagacccacagctagtatcatactaaatggggaaaaattgaaagtcttttctcaaaaatctggaacatgacaaggatgcccagtttcaccactgttattcagcatagtactggaagtcctagctacagcaatcagataagagaaagatataaagggcatccaaactggaaaagaagtcaaattatcctagtttacataggatattatcttatatttggaaaaaactaaagactccaccaaaaagttattagaactgatagacaaattcagtaaagttgcaggatacaaaatcaacatacaaaaatcagtagcatttctatatgccaatagtgaacaatctgaataaaaatttaaaaagtaatcccaagtataatagttacaaataaaattaaatatctagaaagaaatttaactgaagaagtaaaagatatctataatgaaaactataaaacactgatgaaagaaattgaagagaacccccccaaaatggaaagataatccatgttcatggactggaagaaccaatattgttaaactgtccatactacccaaagcaatctacagattcaatgcaatccctttcaaaatactaatgacattcctcacagaaatagaaaaaacaatcctaaaacatacgtgaaaccacaaaagacccagaacagccaaagctatcctgaggagcaaagagaacaaaactggaggaatcacaatacctgacttccaattacactacagagctaagtagccaaatggcatgctactgacataaaaatagacatataggccagtggaacagaatagagaacgcagaaacaagtccacacacttacagtgaattcatttttgacaaaggtgtcaagaacatacattaaggaagagagtctcttcaataaattgtgttgggaaaactggtatcttattcagaagaataaaactagacccctatctctcaccatatacaaaaatcaaaatagattaaagagttaaatctaagatttcaaactatgaaactataacaagaaaactttgaggaaactctccagaacattggtctgggcaaaaatttcttgagtaataccccacaagcacaggcaacaaaagcaaaactggacaaatgaggttacatcaagttaaagagcttctgcacagcaaagaaacaatcaacaaagtgaagagacaacccacagaatggagaaaatatttgcaaactacccatttgacaagagaatagtaaccagaatctataaggacctcaaacaaatctaaagggaaaaaaatccaataatctgattttaaaaatgggcaaaaaatatgaatagagatttcttaaaagaagacataaatagctaacaggcctatgaaaaggtgctcaacatcattgattatcagagcaatgcaaatcaaaactacaatgagatatcatctcatcccagttaaagtggattttatccaaaagacaggcaataataaacactagtggggatatagagaaaagggaaccctcatacactgttggtgggaatgtaaatttgtacaaccactatggagaaccatttggaggtttttcaaaaacctaaaaatagaacaatcataggatcctgcagtcccactgctggatatatacccaaaagaaaggaaatcagtatattgaaaggatatctacactcccatgttcattgcagcactattcacaataaccaaggtttacaagcaacttatgtgtttatcaatagatgaatggatgaagagaacatggtacataaatacaatgtacattttttattcagccataaaaaagaatgagatcctgttatttgcaacaacatggatggaactggaagtcattatgttaaatgaaataagccaggcacagaaagacaaatttcacatgttctcacttatttgtaggagctaaaaattaaaacaattggaactcatggagatagaggataaggatggttaccagaagctggaaagggtagtgggggaagtagaggggaagtggggatggttaatgtgtacaaaaaaatagttagaaagaatgaataagacctactgtttgctagcagaacagggggactgtactcaataatttaattgtgcatttaaaaatgatgaagagagtataactggattgtttgcgacacaaaggataaatgcttgaggggatggataccccttttaccatgatgtgattattatgtactgcatgcctgtatcaaagtatctcatgtaccccataaatatatatacctaaatgtacccacaatattttttaaaaatacaactgttctggggtaagacagtcaaaggaagcttcatttgaaatttattatgccatgttaacagacctaaacccagtttctggcagaatcacttaattaggttagccaagctctatattaatcagcaagatttaaagaccttcatattattaccataacaatttttgctgaagtgatgctgaaaatctcagatcttctgctatggagccaaaatcagtcataatagcttccacataaatggaccatataaagggaagtggacttttaaaaaaactatagtagactgttcccattactctcttttaatctgtcttcatgttaaattttttctcaataaaaaccaacattcatgagacaaaaactagtcatttaattgtgatgatgtcactgaaaaactttgaaaatgcaggtctggtaaccatcttccttttgccctttgaagcatgatggtacctgatggctcatatgcagcctcttgacagcctgtgttcacctccttgtgaacctcaaattggttcctgtgctccaggcaaaaataaataaataaataaaaggcttactatcttcccatattttttcctcttccctctctttctcctgtcttcccatcctttctgcttgcctgccctccaacagattttgagaactcactaagtaatagattctacaagaaatactagaaatattaattcaaagctaagacaaaaatctttgctgtaaagagctcaccatctggtggaagggtagaaagttctatgacttttctgaagcattcaaattatttccttttttttccccctgcatcagcacggggggcagtgggagaaagggttcatgaatgcactctctcaaatttcacttttatcagatctatagtaagagatgaggaaggggctcctttttcttctcaacatttgaatcggtatttgtgttaacatgaatgttctttccttaatgttcaagtgattcttcgtcagaagaaactttgtaaatacatcatcaggttacaaccctcaactcctgcttaatattgagtactgtaagtgaaagaaaaattaagaatgtaattttaatatgatttgggttttgtctgacatctgcacgttaggtcaatggtctcatgagccctcttgtaacatggcttttcatatgcctgttccccacagggttatggctctgctttcttctccttgacatggacaccactgtgtcaatgtctcctggctcacgaggttccagccaggctgaccttctgtatcttctgacatgatgggtgctttcaaggcagaggcctttcacgtgctgtttttgtgctggaaatgctgctcctcacattctttgctgggctcaggtctcagacttactgagttctcgaacaaatgacaaggccattgttaggagcactcctagcactctctccactctcaggccagacacaggagggtctgggggttcatgagcactagctttggctttgggctttctgcatttgagtcccagccatgtccttagcaacagtcatgagaaggtaatgagaaggatgacagtgtttatcactgtcattttatgtcattttatttgtttatgaaaaaaataaagattatacatttaaacctctctctttatggtctctcaatactacttaaatgtcagttccctttttgttagcaggcttacacacataaattgcctactaataagcaaacataagtggtcccacagatatacgtaaacatttaaaccaatatagaattgataacctgtgaaagcctccttaaatattcaatctggtctagagggtcacccgtaggattctaaacattgatcagtctacacatggttaggctccctataccagtctatactggtcagttagcaaagtgcatgaggcactttagacatgttgtgatatttttatttttagctgaccgtatgaagatagatacctatcaactgacatagccacatgcacaggactgttttctacaatagctagagtggacaatggagaattctttaatcatttttcttttcaggaatggtatgaagacaactgacaaaggtcacttctaggaactaatttcttcaaaagcttaccactgttccattgtccactgagagtcaatatcagcaatttgccaatataattctattgattaggacaagctagattatgctgcagtaatgaaaagaccccttccctccccaccaaatctcagtggcttaaacataaaagacttatttctctgcacactgccatccaagggtcagcaaggcctctgctcattgtaatcactcagcactatctgtcactgtctagcagacagagagtattctagagggtctgacactggcaattgaatgctctgttgcacaagtgactcacatggctcataacccactggccagatatagtcatatagcccaaccctaccctgaagggatcccagtcacgtaatcttactaagtgtccagaaggggcaaaactggaaacatctggtgaattacaagaacagagtttaatattgattggatttttatattatctcaaatatgataacatctgagggattcttttcctttttctttttttttttctgagacagagtcttgctctgtcggacaggctggagtgcagtggcacgatctcggctcactgcaatctccacctcctgggatcaagcgattgtcctgtttcagcctccggagtacctgggattacaggcatgcaccaccacacccagctaatttttgtatttttaggagagacggggtttcaccatgttgaccaggctggtcttgaactcctgacctcaggtgatctgcccgcctcggcctcccaaatgctgggattacaggcatgagccaccgtgcccggcccctttttcttttagactttttattgtactatgatcaaccatataccctgtattattattattattattattattcaacatccagaattaatggccttattaagaccttattcttggcctgttaatgcaagaatgtggcaatagcactttgttcttacgtagaaaaatatttagaaaaaaagatagtctttttttctgtctcaatattcttattgagaaatctctgtacatgtatatatgtatgtatacacatatatatgatatagatatgtgtatgcagatgcatatattccagcttttatattaatgactgaagaaggaaatactatgttaaaaaatagtggcataagaaaaaaatcctaattcgcattttgcctgtattttgacaatcaaaaaagaactataaaaataaatgctgaccaacctcaccttagttaaagcatccagagaaagatcaggtgggttggtcaaaggaagtgcaagacatgccaacctcaaagggcaccaacaaggaccttttaccaaagctagaggatactcttgggtttgggaatttgccttctttcaacattatttctattaccttttaaaactgtaatttcatctcacccctattgtgcatttcataggtcatctcctaaagagctaaaacaaagagtcaaacagagtactaataggtaggcagggctcactcataccagcactctcttcttatgctggttttgcttaaaggctcctcaatgaagagataaccactatattagtctgcttgggctgtcataacaaaataccaaaacttatgtggctgatgcaacagaaacatattttcttgcagttctggaggctagaagtccaaaatggggtgccagcatggtagggttctggtggggttctggcgagggctgtattcctggcttgtaagcagctacctcttgctgtgtcctcacatggtaagaagagagggcaaggtcaagctctgcagtgtctctacttataagggccctaatcccatcataaggctccaccccacgatctcatctaactttaattaccttccaaaggccccatctccaaatgccatcacactgggggttagggtttccacatacaaatttgggcaccgggacacaagcattcagttcataacagccactaagcagtttctctccaggccagtaaggaagctgcatggcatctggcatccctgtaagtagacatccaaagcactccctgtgcccagaggtggtctctgcacaaacagaagcaaaggaggccatcatatctgccactacaacaactattgggtcctttgaagtgacaggcaaggtgtattttttttttttttttagagacagggtcttgttctgtcacccaggctagaatgcagtggtacaatcatagctcactgtagcatccaactcctgagctcgagtccaggagtgatcctcctgcctcagcctctcgagtagcctggctaagttttttatagagactgggtctcactatgttgtcccagttggtcttgaactcctggcttcaggtgatcctcgtgcctcgacctcccaaagtactaggagatatatatagcatttatatatgcatttatatataatatgccagcaaaatatatattctaatagataatattatatattttatataaatatatatatcaagttttaaaatatatatatatataatttttaactggaatatttagtgtttgaaggtagcagaccacaaattctaaatgtttctttcacttatctaaatagcacaggaaacaagtggcaatttgacatatttgtaaaacataccactgggaaaatcctgctctcagagagaatgctagaacagaaaaacctgccggacactgagacatttgccctgctgggtacttggcagctacaagttagtactttaatcccatcttcaaagtgccacccaggtttggcttcaaggcctacaattacagagcttatttaccaaaggcactatgcaaccttcccagcaggccaagactcctgtgagaatgagacaagccaaagcatctggaacacctaaaatttaccttaaggttggtaacaattctgacagctaacagctattcaaagtccaccacactaaggaccagatactgtactaagcatttcacatatattatctttggtcctaccaatagcctatgaattgccacaacatttttcccatttttagaagaggacattttctctctttcagcttaatttcatagacattgctcatttgcatagaatagtggttaagaactggggttttgtagtcatgctgcttagtatcaggtttaaagacaccataaccagctatgtgacatcaagcaagttatttagcctcagtttcttaatgtttaaaatagggataataaagtgtactttcatgaggttgttgtgagaattaaagttaaaatatgtacagcatttaagacaatccctggcatatggtaaactgatcaacaaatgttagccattatctgatcacacttcataattacttatttggaatccattttagataatagaaagcaaatatatagggaaaatgtacactctcagcttctgaaaggtaacaattatgattaccaatttaaaaatacaaaacaattgacacccaaccagtgcctaaaattttaaacaatagttttgttacagtaggtagtcaggcatgagcagggcagaagagggccccccacctaccaggaatgtccggtgaccatcaggtgatggtcaggcagttgttaaaactgtctctttaaaataataattggtcacagcaagtaccagggaaaggcagtctcccaatagacagaaaaaacctgaaactgcagatcagcagcttcccgataagatctcaggagttggggcaagtgggctcaaccatgtgcactaaggcaaaatggtggagcttaactcatatatgaccttctaggaacactactggtaacggaagaacgcctgaagtgagcatgtgtacaacgtcagtaaatacactatgcttgcagcccctcccaagtgctagcaggccactgagcatgtggatagcccaaccaaagggaagactcaggggagaagtaatgcaaccacagaagcatgccattgtttaagacccaaagtcagaggtcaaactgcacacttgaatctctcaagttgcccactggccttcttccaagtgcactttacttccttttgttcctgccctaaaattttttaaaaactttctaaaaaactttcattcctgctctaaaacttgcctccatttctcactctgccttatgccctttggtcaaattctttcttcttaggaggcaagaactgacattgctgcagacccatatagactcacccactgctaacagttttattccagcattattgtaaagaaaatgaaaatagccaatcatgtcagagccaaagttacatttctctgagtatggaatattccattagtaagtcagtctttggttactgggtttgacagacttaacttccctattctacttggccagctctaatcttgagaggacattggccctcccaaaacttgtggccagcaccatgaggaaatctgcacttcctggcagcagtaatgacttaaaagcagagtaggcatgatttattaattagatctgtgctctggccacccctctgttttctacctttagcttcttttccatccttcatttgagcactgggctctttcatcacaacaaaggcagatgaaaatgcagagtgtttaggggatcctgagacctgtattaacagtatcttatgatattgtctatgtttagtggccctgtatctttcagttatgtgggttctttagagtacattgcctaatttattaccctccatgtcaagaaggaaaataatcctttcaatataccagaagcagctacctttatgaatttaaagctaccacattgccacaagaagcatgggataattttaacaaattggctgccaggtgtcagctgtccctgtcacagcatatttactatttctagataatactgacatcaacagaagcagcagtaaatcgcttagtccacaacagaatcaccatgagtctttagtcatttattaatgtcaatgcttggtatgaaattcaggaacctgatccccatgagggcccctagcatcgtccactacaaattacattactaacacaggccaattgtcttaaaatctgtgcctgtggtcacaaggagaactgggtgggaatgtacagataaatagagtctatctatccttctcctaaggaaaaataaagagcaattcaaaggacatgtctactaaggggcggtaaataatattatctctcaggtagttcctttgccctttgtctgtcttcaggaagtgagcttattagtgtcttatttagaacatatatatgttacacatatcctatctagggccaatgcacggaatttcaatgtaacattgggaatatagtggaagatatattttgaaatgcaactccctctccccttcccccaccccaagactgttgacaggtgctaagaaagaaagaaatgaggaaatttttcttaccgaagcatgcttatcaacaccatcaccattagtggatatttctaatgtcccactgtgcccaagtgagttcagcaatccttgatgtctttaagcacaggcctgagaacacttaatgggagatattttagagacaactaacccaaggagcagctgcaataaacagactttaaaattctcctccagctctagcttctgttgttctgttcttcatcaagtttaatataaaaggcaaagtgtctgcccttgggcagttaataatctggttaagaaagcacagctgaggcaagcctctttaaccttttaaaaaaaacaattaaaaataatatttggcagctcattatcttggtttgtctaaactatgtatattgaaggagataagcaagaaggttgattcagggctgaagaattcaaaggagagtttggggaaggagcattaaaatgaagaggtattaaagcaaataaattgactttcacttcatagaagataaatagaatgtttggtcctttagcccctgaagcgggctggggagtaggggtaacatccatggtccatatgagtttaagatttttttctttaagatttgtctctcttggttagaaggcagagattgcattttggatcaatttatctttctcttacaaggcatattaatggaagccatgtattcagtaagcccttgctagtcactaatttttaagtgtcataaatgggagactgtgaatggggatgatgctaatctgagcctgctccctgccatgaaaagcatcacatacaacctctcgtatggcatgccaatgacattgtcatacctcttggctgaaaatcagcctaatcaaaatggaaaatgccaggggaaaaaatacaccaaggggaataaaaaaaaaaatgatttcgattccagcttcttcacaaaaaacaaaatattatcctttattcatgaaaagttgacatttttcacttaagttttcttaatgtggtggattacattgattttctaatgttaaaccaagtttgcattccagagacaaactctatatactctaaatcttgtttatatattactgattttggtttgctagtattttgtttaggatttttgcatctcttttccaaagtaaaattagcccataatttttattcctaacattgtccttgttatgtttccatcttaggttatgtgtgagtctgtctgtttttgaatgttaggtagacgtcaccagtgaagctgtctgggcctggaattttctttgtggaaagattttttaaattactgctttaatttcactcatagttatggaaccattcagactttatactccttaatgaatcagttttagtaaattatgtttttctggaaattcatctattttatctaaaattttgcaaatattgacagaaatctgttcataatcttttcttttcaaacgtgtctgcagcatctatagcagtctcctttttactcctgatattagttataataaaccctgacttggccaccttgcctgccaatgtcattgtagagttggctggatgacccaatcttgactcagttgctacctgtgcaaagcagaggcccctggatgtcctactcctgctatgtatgtatcatacttacacaggacatgcccttagctagcccagtatgtatggactcaacaagcctagatactgccagataattaacaatgtctaggggctttgcatttctcatttgggacaagacaatttgtggtcctttcttttctcctccaaacctcaaccagcagagccttcctagactccatgctttattggattgcctgtttagcagtaaaactcttctactcagcaatcaatcctggctttctaatcgtctttttttttctttgacggttattagtgccttatcttttttttacttaacattcttgccaggaagttatcaatttcataaatctttaaaaaaaaaacccatcttcagtctttattgtacctctatagtgcttttctattttattaatttttgttctcatctttattatattcttttctgttttgttttgctgttctctttcaaaattcttagaatggatgctcaactcagcctttttattttgttttctaatatatgcataaaagctatcaaatttctctaagtactgcttgagttgcatttcaattgatatttacataatctttcaattcaaattatttttgaattttcataatttcatctttgagccatgggctctttaagagtatatttgtgatggttaattttaggtgtcaatttgactggttaagggatacccagatagctggtaaaacattatttccaggtatgcctgtgagggtatttccagaagagattggcatttgaatcactggactgagtaaggaagatctgccttcacccaatgtgtgcaggcaccatccaatcagttgagggaccagatggaacaaagagaaaagctatattcactctcttctggagcttgtatatccatcttctcccctgcccttgcacatcaaaattctgggttctttggccttgggactcttggacttccaccagcaacccctctggatctcaggcctttggacttggactgagagttacaccataggctcctctggctctcagacctttggagtcagactgagccacaccagcagtcttcctggttccccagcttatagatggcatattgtggggcttctcagactccatgaacacatgagccaattctcatattaaatccaccctcatatatctatgtctatatatcctattatttccgtttctctggaaagccctgactaatacaatgttcctgaatttcctatcatatggggtttatattttatttatttatttttgaaatggagtcttgttctgttacccagctggagtgctgtggtttcaccatgttggccaggctggtctcgaactcctgacctcaagtgatctgcctgcctcagattcccaaagtgctgggattacaggcatgagccactgcacctggctgtctgtgttactttacttataaatttgtcgagacttgttttatggcctatacatgataaaactttatgaatgttccatatacatttgaaaagaaagcatatcttgcagttgggtggaatggaatttatatgtgaattatctcaagctaattaattgagttgttcaactcttgcagatccttactttctttctttctttttttcttttttttgggccaccttgttctagtagttaacaagaaacatgctaatatctctcataatgattgtggattggtgtatttttttataggtgtcaattttttgcttttgtattttgaggctatataattaggttgagacaaattttaaattgttacatctttctaacaaatttaatacttcaccatttaaaaattagcctatttctaataatgcttttgtggtatagtaaaatatatatatttagattttggtcctggttactggcacagagcttcaaaaatctttgaaatttcctgaaacataattgtctttttttacactaatgggatgactccagggtggagggagggagcttctgcttcattctttcctctgcttctggaaatataattttatgttatgttaaaaacttcctgactatagcctcttgtgttagtccattcttgcactgctattaaaaaaaaacctggccaggtgcagtggctcatgcctgtaatcccagcactttgggagacagaggcgggcggatcacaaggtcaggagatcaaggccagcctggccaacacggcaaaaccctatctctactaaaaatacaaaaattagctggtgtggtggcacgtgcctgtaatcccagctattcaggaggctgaggcaggagaattgcttgaaccagggagttggaagttgcagtgagccgagatcacgccacagcattctagcctggcgacagagcgagactccgtctcaaaaaacaaaaacaaaaaaacaaacaaaaaaaaccctgggagcaggtaatttataaagaagaaatttaattggctcacagttccaccggctgtacaggaagcatgatgccagtatccacttggcttctggggaggcctcagtaaacttacaattatggcagaaggcaaagggggagccagcacttcacacagcctcagcaaaaggaagagagagaagggggaggttctacacactttgaaccaaatctcatgagaactcactcactaaatagtaccaaagggggatggtgctagaccattcataagaactctgccccatgatccagtcatctcccaccaggccccaactccaacacttgggattacaatttgacatgagatttggtggggatacagatccaaaccctatcgttccacctctggaccctccaaatctcatgtccttctcacattgcaaaatacaatcatgccttcccaatagtccccgaaagtcttatttcagcattaactcaaaagtccaaagtccaaaatctcatctgtgacaagactaggccttatgcctataatcccgtagaatcaaaacaagttagttacatccaagatacaatggtagtacaagcactaggtaaatagtccccttccaaaacgaagaaataggccaaaagaaagaaactatagccagacacagtggctcaagcctgtaatctcagcactttgggagaccaaggcaggcagatcacaaggtcaggaattcaagaccagcctggccaatatggtgaaacctcgtctgtactaaaatgcaaaaattagctgggcatggtggtgggtgcctgtaatcccagctactcaggaggctgaagcaggagaactgcttgaacctgggaggcagagattgcagtgagctgagattgcgtcactgcactccagcctgggtgacagagtgagactctttctcaaaaacagaaaaaaaaaaaaaaaaaaaaaaccagaaaaaaaaaaaaaaggaactctaggccccatgcaagtccaaaacccagcagggcagttattaaatcttaaagctccaaaataatctcctttgacttaatttctcacatccagggtacacaaatgcaagtggtgggctcccaaggccttgggcagctctgcccctacagctttgcagggttcagcccctgtggctactttcatgggctggcactaagtgccgatggcttttccaactacagggtgcaaactgccagtggctctaccattccagggtctggaggatgatggccctcttctcccagctccactagacagtgccccagtggggacttgtgtgggggctccaatcccacatttccccttcatattgtcctagtacaggttctccatgagggctctgcctcagcagcagtcttctgcctggacatccaggcttttccatacatcctttgaaatctaggtggaggctcacatgcttcagctcttgcattctgcacacctgcaggcttaacaccatgtagaagccaccaaggcatatggcttgcaccttctggagcagtgggctgagctctatctgaggccctttgagccaagtctggagctggagtagtttggatgcagggagcagtgtcccaagcccacacagggtggcaggtctctgggcatggccatgaaaccctcctatgtctccagacctgtgatgagaggggctgctgtgcaggtttctgaaatgcctttgaggtcttttccctattgtcttggctatttgcacttggctcttctacttacacaaatttatgtggcctaactgaattcttcccctgaaaacaggcttttcttttctaccacatggccaggctgcaaattttccaaacttttacaccctccttcctttttaaattccagttttatgtcacttttctgctcacacatatgagcataggctgttagaagcaaccaggccacatcttgaatgccttgttgcttagaaatttcttctaccagatatcctaaatcatcactctcaagttcaaagttccacagatccctagagcagaagcacaatgcagccagggtctctgctaaaccgtagcacaagtgacctttactctagttccaaaagttctttatttctgtctgagaccttattaccctggacttgattatcaacatcactgtcagcactgtcataaccattcaacaagtctctaggaagttccaaactttctcttaacttcctatcttcttctaagccctccacactcttccaacctctgcccattacccagttccaaagctacttccacattttcaggtatctttatagcaacaccccactacttggtaccaattttctgtattagttcattcttgcattgctataaagaaatacctgagactgggtaatttataaagaaaagaggtttaactggctcatggttccacaagctgtagaggaaacatgatgctggcatctgctcagcttctggggaggcctcaggaaacttagaatcatggcagaaggcaaaggaggagccagcacttcatatccagaaggaagagagagagcagggaggtgttacatgcttttaaacaaccatatcttgtgagaactcactcactatacagtaccaagttggggatggtgctaaatcactcatgagaacttgaccctgtgatctaatcacttcccaccaggccccacctccaacacttgggattacaattcaacatgagatttgatggtgacatagatccaaaccatatcacctctctttcatattttacatctctttcttcttttgtgctttcgaaactaatgtcctcaaacccctctttcagttcacgaattctctcttcatttctaattagttaattttaatcagattttaatttcaattataacatttctcattcctagatgttcatttggttccttttttgaatctgctttgtctttttggttttctttttttctagcttagattttctttctggacacagtaagtgtaattatattctgaatttgataatttcaataaatgaaatcttagtaggtttttttttatgttaattcttgctcatgtgtgtagtctctttatatactaagtaattgtagaaactgaattgcccatattctctggagaattatttgtggatattcttttagaactgctttaatcacctccaaggcaattttccttttaatatttcgagggtaatatatgggtagaatacttctgttcaacctaagccagaatatatagccctctaggcttctagattttttaaaaaacgatttgtcttatttgatttcctacctgagaagacgctgaaatttgtcttctgttcccagagtccataaggtcatgtaatttttatgaggttcagacaataagtaagagtggcttggtgtgcaaggtttcctcatttacttagattttagactcatacatctttactcttttgctggatattcagcatgtttaaaggagaaggttaaaaatatagttatttcagctttttaaaattatttatttatttacttattttttgagacaggatcttactctatcacccaggctggagtgcagtggtgcgatcatactcattgcagtcttgacctcctgggctcaagtgatcctaccaccccagcttcccaagtagctgggaccacagctgtgcaccaccatgtctggctaatttttaaaattttttgtagatacagggtctccctatgttgcccagactggtctcgaaatcatgggctcaagatcctcactcctcaacctcccaaagtgttgggattacaggtgtgagctgctgtacctagctttatttcagcttttaaagttattttcagctgaacaatatattctgatatttaatcatgttaattgatatggaaatcaatattcattatgtaaataatgaatatgcaaattattataatgaaaatacatatttacagataagccgagttttttttcttgaacaatttttttatttccttgggactaatttttttgtattttcatttgtttagttttctaagcatcatgagttcagcctcaaattcttagccaattatctaagtcttttctcaataatttaagatgtacatatattccatcaaatttagtgtgaaggctttctcctggagctttttttacctactcttctggacttgctccaatgtccattatgtttcacttctcatctgttttcattctctttcatgtttctgttactgactagaggttcttgatttctcattgcaatagaaattgacatgaggccaaaagaattttcccagacaagccttcattaaaacttatgcttgggcataaggaaggcagagggtggggggggggaagagagagagaaagagagagagagagagcgagagagagaatcccctgactgactctgaaaagagccagtagggcttttttattagactaagcaaaggaaatgacatcagggtagggtatgctggctgaggggtagggcatataggtcagcattatctggtcattagagttatcttgagtaatgggccacctggtggtctggccagtggcaacaagactataaatcaattgtccaacattccttactgaggggggacactgcaaccttgcttatctcctaaggccagttcctagaattatttaagtaaaaggactatagcagtgaggtagtagtgtgggttttatgatcagtgggaatacatgaaagaatgctctagtaggggtaagctgaagccaagccccatctctactcagtctcatttccaaatacagaaaatatttatattctattctaacatttcattaataatttgattggtaagggattctaggttggaaataatttttcttcacaattttgcgttggtcacttaacatccagcatttgtgagatgtctgaagctattctgatactgaatattttgaatttgtcctgttttgatttcctctctgaaaatttgaagaatcttttctttgtccctagtgttataaaatttcataattggtcagagtttatcttttatgctaggatacttcccaggcacttttatcaataaacacatacttctctttgaaggaaaatttcatagactattttgttgatgatgtttttccctttgttttctttgtttactctttctagaatgcctattatctgaacggtgaacatcctgcatcagcactctaactttcttaccttttctttcctatgttctatttccttgtcttttccctcctttctctggaagatattctaatctttatttcttattttttcccactgaatttatcattatgatattctccgtataggagaaaaagtgtttttttttttcctattctttcactcaacaacaagcaacatggaagatttctgtgaccaaatatgtggggatgtttccccaccaacaagcaaggaatcagttctgcagtggatgctaactgagtgtcctctaattcaattcaattcttatactatctacctagagagagcatcagctcccacaggctgagggttcagtccctcaagatgcccaccctgccaccctgccttagatgccaaccacaagctccaggttgttttacctgtacttctaatcaactgggtataaaagtgggttcccacaatcttttccttggatttgattaatttgctagagtggctcacagaactcagggaaacatgtttaccagtttattacaaaggatattgtaagggaaacagatgaagagatgcatgggtaaggcatgtgggaggggacgtagagcttccatgccctgtgttcagctatccagaaactctctgaatccagtccttttttttttaatggacacttcattacataggcatgattgattatcactgaccattggtgatcaacttaaccttgagcccctcttccctccccagaggttgggggctggggcttaaagtcccaactccataatcctgccttggtcttttcagtgaccagcctcatcctgaagctacctaggggctgccaaccatcagtcaactcattagcacataaaaatacctcacatttggagattttaaggatatgaagtgttgtatgccagaaaataaggacaaagaccaaatatatattttataatatcacaaatatatttttccagagtttaaaaaatgcctcttttaccccattctttttcatggatacaacattttcttctctttttcagagtatattaatggtagattttttgagtgttctctctgcagagtctctgttccctttaagttactttttctattgatttggtctctatcttttattttagaggaattcttcagatgtttgttgctctttggttgtttccacctttgggctacataacctatttaagctctgagatctcagctcaccattcttaaaactatggtagtctgttgggcccaatttaggaaacgctgatctatgtcatactaaatgaactttatcagaccaggcatagacaaaagtgaaacagacaaaatgtgcttttcataagccctacctccctctcccttccttaggtttcttccataactctaatcctccctcaccctacttctttccttcaaaatctctctcttgtctgtttccctcattaaaactgattcaagtaaaaaatctatcattttattcatacacagtatgaatgactgataagactaaacatattctctggtatttggttgttaaaacaagaacaaaagtatttcttggggataaaccaaaggaataaactctgaggatataacttagtcaacatcaatgcaaatcagcagaaaggtgtaagaaacagacaactccctaaataaaagcaaacctcttattctacacagttggcaatggagggagaatctccacaatggatgacgtagcagaaccctcataatcccaactgttgccttctatgattcaccttccccttaaggattttcctctaattatccctgtaaccattcctaggccatgaagaggcgaaggtttttccctttggacactgaggcccaaaaatggaagcctgttcttctttgacatcccaaacagggcaaagtgacaccattatagaagattttattaatgtctaaagagaaattaacagaaacgtcacaaaactagataataaggagtatcagaagtgaccgtgggtactagcccaatcctatcctcatttctgttcccagcattcagaaacatagactagatagtctgattcctctttttctaaaagcaagagatgaaggctcagaaagaagccatctcctcctctactgagttaaggtctttcttctaacagaagctgcagactggtagaatatggactgatccatagatatattttgttagttctgttctacttaaaaatcacttaaaatttagtcatcagcactgaaatttttgagattgtatttcaaaaaagcaaaaccattttccagcattgaacatatatgcatacacagacaccccctccccttcaacacacagtctgcagattctaaacatctatacagaaatttctaacaagaaaaaccatcttagagacctaaattctaagattttattaatatagcacaagaaaacgggagaaataatacagcagtgtgaattagctgaaagacagttgaggctgggcatggtggctcacgcttgcatatcccagcactttgggaggcagaggcaggtggatcacttgaggtcaggagttcgagaccagcctggccaacatgatgaaaccccatctctactaaaaagacaaaaaaaattagccgggtgtggtggcgcatgcctggaatcccagctacttgggtggctgagacaggagaatcacttgaacctggtaggcggaggttgcagtgagccaaggttgtgccactgcactccagcctgggtgacagactaagactccgtctcaaaaaacagaaagtaaaaaaagacagttgaatcagaagccaggagagttccattctagtcccagccatgacacaattagttttgtgacctcagcaatatcatttagtcctctaggtctccatttccttatctatcctatacagagaatgaaattaaattatatttaacagaccttcttggctataatcttgtaattcaagggcaaaattttatcaaagtactcaagtcagataaatcaaagaaaacactataattatacaaagaaataaatctgacacggtaatatttttgtgttaaaatttatctagaactgacaaatatgcatgcataaaatgagagccaaacaaatatatgaagtaccagattaaattctgcttcaactaggagaaaaatgtttttcttgtagatagcaaacttaaatggatcaactggaaaccatacacaattcttccaaaacaaccatataaatttaacggatttaaacttatacacaaaacattagttaaaacattaatcatttactaatgccctctcatttatgttctccaatgaatttgcattagtcttacaagagataaaacaggaagcaaaataagccttcctgagctttctgtgattataatgttgagtgacagattctgtagaatgaacaatggacaatggaatagtctggccaaattaaacactttctgtaagcagactgagcctttatctcagccaagtaatcatttttcttccatgaaaaataactaaaatcacgccaagttgtatcactgccacagaaattggaatggcttcaacatcccataaaaacaatgacacttaatgaattgcttcagttaaatcatgccggagagagaaaatagatgaacaatttcattgtgttatgtgtggtccaaaagatatgatcaacacaggtaatcactgactcccttcatgccagaattaccacctgagataaacacacctggattcccacgaactttcttggtttatgctgactaaaatgaagtgattaatgccattaagaagcaagctaaaataataggttcaaaaagagcagcaccaaatagtgtgaaacacacagacaaaagacaaaatcagcaagtaagactgaaccagtttgtactacttgagacatcattttaaaagaatttagaccaccacaaaacaacatactgaattacacaaggtactgatctacaaaagaaatctaaaatatttaatacctcagaaatatttgtgaatccagtgaccttgtacatgttttcttagaagtttaaaaaatatatatattgtattttttctttgtattgctctttagtttttccttctgtctgcagtgaatacagaattaagagataatgtccaatgtaccacaaatagaatataacatcataagtacagaatttcaagtttacactaagaatgaatgtatgaatgtgatcactatattgttctgcatgtaaaacactgttaatctttttcagagactgggtctcgctttgtcacccaggctggagcgcagtggtgcaatcacagctcactgtggcctttaactccccgggctcaagcagtcacctaccctggcctcccaaagtgatgggattataagcatgagccactgagcccagcctaaaacactgtttaaagacacatgtataaaagatgtttctgtccgggcgtggtggctcaagcctgtaatcccagcactttgggaggccgaggcgggcggttcacgtggtcaggagatcgagaccatcctggctaacaccatgaaaccccgtctttactaaaaatacaaaaaaattagccgggcatggtggcgagcacctgtagtctcagctactcgggaggctgaggcaggagaatggcgtgaacccgagaggcggagcttgcagtgagccgagatcgcgccactgcactccagcctgggggacagagcgagactccctctcaaaaaaaaataaaataaaataaataaaagatgtttctaagagtgcaacttgggtgtctgattgagaagagagttgtttcaatgaatgaaggtgtccacaacacaattctgcatgtgacatactctgaaaagacacacatataaaatatgtttctaaaatattctaaaaaataataaagtttgcactaaaaaaaaattaaatacaaagaactgaagttcaaatatacctaatacagaaatattttcattctgatagataaataacatacatctgactattgattactctgtcttagatgtcaaagtcatttattatctttggtttcatcagctgttttgtacttacattttaatatatgggttcagttgtctgagaatggggtgggggaaggtttacagtttcctctttcattcccttgttcagaagaactcttgttcgctcctcatggcagatgacgtgacctctcaagataaatttaaacagattcttcctctatttctttgtttcatattttccatgggttggaaaaaaatggttagttttaaagctgtgaaatatataaaggatactgtcatgtaatatccttaattatgttcataattttaaaacaagatttgccacataaaagctacccgtgcataatcaagattttcctgtgttaacacattttcactgcaggattgcttccctatacatgctaagttgagaagctgaggttttttgtttttgttttttttttttgagacagggtctcactctgtcacccaagctggaatgcagtggtgtgatctcagctcaacctccacctcccaggttcaagcaatccttccacttcagcctcctgggtagctgggaccacaggcccacaggcgcatgccaccacgcctggctaattttagagatggggtttcaccatgttgcccaggctggtcttgaacccctgagctcaagtaatctgaccacctcggcctcccaaaggctgcggttacaggcgtgagccacggtgcccagcctggggcttctactttttttttttttgtttttttttttaatagcaaagccattgcaatagtcgctccagaaaatgtctttgctatgatcttaacagtgtttgacagccttaaaccttctttgttccttgatcctgatggactctgtaaatcattgtctggtactaaaacaattgtcagctcaaacgtcaggagccctaaacaacccaaagagacaaactaaaagagaagtaagttctgaggtttatatttttaaaggaaaccttcaatgaagcatttctcagtctcttccaccagagtatgctgaaggcagaggatagtcaaaagagtctaggggacagaccgacttacgcccgagccagagatttctttgaagtcacatgtttcatcttaaaaattcatttgaatggttaattctacgccatatttgtattaatacaaattttaagcaatttaccaagttatataacttttcctccaaatagtcaactaaattgatgcttgagaagatgcaccatgtttgctgggcacaatggctcagctgtaaatcccagcactttgggaggctgaggcaggtggatcatttgagcccagaagttcaagactagcctgggcaacatggtgaaatcccatctctacaaaaaatacaaaaattagctggggcatggtggtgcacgcctgtggtctcagctactcaggaggctgaggtgggaggatggcttgagtccaggaggtcaaggctgcagtgagccgtgactgtgctacagcactccagcctgggtgacagagtgagaccctgtctcaaaaaaaaaaaaaaaaaaaaagatgcaccatgtttgtcttggagcttttagtacttcccacacccaaccacagctatgtactccctggatgttcatataactcggtatgatgcacagggacattgaatttaattacaggttgaatactttctattgagctcttctccaacttatcatgacctgggtgtgtttccttatttcaacattgttccattttttttttccagttttccaagatcagcttggacttaatttcttccaagagtcttctctggtttctgacaatgattctcctttctcatctcctatagcacaacttgtttgcttcacacatttttcacttgatcatatatgatcctgtactagttctatttatatgttttgtcttgattcacaataatttcacaaatttcttaaggataattctctatgtgtttcatgtttactgctacataaaaaaccaccacaaaacttagtgacttaaaacagcaacaatttactgtttctcgtgattctgggggtcaacaattctcagctgggctgggcttagctgagcagtactttggcttgtcccatctggggtcactgatgtgactatagtcatctggtagcttgacaggggctggagggactaagatatccacacttagtccatgtctggggcttggtgctggctgttggctgggcctccctgtgtggtctttcaacttttgttagtctagtccagatgttctttcatggtggcaggggtgttccaagacatgaatgaagaagctgcaagggatttgaggccttggctccagaacttgcacaatttcattcctgtgacattttattttcaaagcaaaccacaaggccaccctagatttaaggggtggggaaaaaatactccacctcttgatgggaaaagctgcaaaatattgtggccatgtttttcaatcagccacatcacacattctctttcttctgtcaatttagcagcaagtgtcatagcgaaggcacgtactagatattagctgatgtgaactcagtgttctggtgttttcatttcatccagcttgagactatatcctcaggataagagtagatttaaaataaaaaaattaaccttggtaatattgatctttaactcattacttggactgattttctctttaaaagttgctcagatccaagcacacatttcttatttcaaaggaataactgtaccttgaacaaacaggttcatgctttgaagactgacaataaattgaaaatagttgttgtccatgggattaggtgctatgggtatcagagagctttgttcactggtatatttgtttattggccaaatactcacccaatgcatgccctgtgtcagtctctgtactatttgcccaacatgcataattgagtagagaagatggatatacagtggatgattataacacaatgtggctgataattgcaatgacagttaaatgcacaagatataatgaaaacacattaagagacataaaataaaatgtttaccaattcagttagaaacttacaattgggttgtgtataagacacacatgaatctcctagttgccatattttatacacacacacacacacacacacacacacacacatatcagtattatgtagcattattaaagccttttgaggatggtgaaaatacacataaaaagaaaacttccattaaaaccatggaatgggcatctgttatttttccctgcccggcactcattcgcctttctggtagtgacagcaccttgattccctacctgctctttcctcagctcttagtccacaagatggggatagagccaactctaccctaatttctcaagctgagcatgtaatccaggcctggccaatcagatcactgcattcttatagtctgagtgacttgttcaggaatagatatatgacccaagaagagctagtgagaccaattcccaggacttctgtgaagccaccattagagaagaatccctcttttctctgtggctacccgacagaatggctgtaagacttgggctgctggaagccatgaccaggagcctgagaataaagccaattctaaaggaaagggctgagacacagcagaaggaaggctgatgacatttgatcctttgaatccatccatgctggacctaactgcctaggcttctccaatatggtcacatttgcattctctctcaccacctcccacttcttcttcaaagtattagagttgggtgtttgctgcttgtcaccaaaaagccctaatatatagtacagaaggaacaaaactcaagaagtaggtttgaggggttgtataggggtcataagaaggccagcattactgaagctaagggcccatgtgggaagcagtgggaaacatgatgtgatatagtagaatgagcccactagatggttaggagtcttgacatccaaaagcatccagaggtgacagcatagtcaattaagtagataaaagagagctgtatcatgagtacctagcaaaaatattaggaagccatagcagcactgactgaaatcaacagcttgcaggcagaaagaacaactaggaggaaactccagtaatcaagagatgagggaggatccatacctagaccatggtactgccaatctgagaagtatgaagagaagaatcaataggaattagggactcctcaaggacaggaaggacaatgattaataaaaagagacaaaaattaactgctaatcaaagacttggctaaatttgcccaaacttaatctatagatagttgcttcacagcattctcagtatgcaacaatagaatgtaaaatggtacccattacttaaagactttaaaggcctttataactcccaattaaatattggaataaattaaattgtttaccctttgacagagggcttagagtatgtaaaataaaacaaaactacaacaaaaatgaaaaaaaaacccttttaccttcaaatggggctgaaggctatcgtgtgtgacttgagtctggttttatgctcactgggcagtatttttaacaatgaaatctaatagtagcattcattctggaaaactgggatatgtcagggctgaatagattttgtatatattaattaaaactgtagttttaacttttttaaacaagatatcaaacccaaattcaggaggctgcttattgtttctttaaatctgccaaggaatcaggatatctcctcatacttcctcccttgggcttgtgggtttgaggtccttcctgtctcaaccacatattctttcatctaactttttgagttcctattagagaaaacttttttttactgttagtttttctgagaaacttcagtactttattttttccttagaccatggggcaccatcagagcagcaatgaaggctgacacatcaggtgagaatctacctcaaggaaagggcaataaagagtctttggagatataggttattggaaattgtgcctggtgttctaatcttagtataaattaaaggtaattgtactaattagcaggttgttatgtctactatcttaaacaatgttttacaactacggaatttgattgaaataagttttggggctctctgagacctgaccaaaggaagaaaaacaagtgcccccaaagctctgagaagcacagacaggtgacagcctcattaggtcagctcaaagggatgcatcagctctcctcaggcaatccctgccccttcagtggccatcagcctgaagcactgcccctttcacataattcacatgtttgacacaagtacatggaatccatgtgtaaggtttacagcttggctgaagtaaaaaagaaaaactatttattcaaaagggcatgtttaaacaaaggctccgttggaattgctaacatatgtaaatatctaatgctagaatttcttttttaactccagtctttcccaatcacaaagaaaagcacacttttcaaaatgaaatctacaagtaattataatgaacctagattatttgtttttcatgggaaaattaggtagcatacagaatacctcacaactgttctggtataatgtatgcatcactttgctgccaacaagatgggctttcactaacacgaattgccctcagaccctgcctcaagtccctgaggaccatatgtctgtcatttctgggagtggcctctgggtggcagtgttattttcagtttgcactttgctcatcacgtcagttttctaagttaaagttgcaagagactcaatcatctctttcaacagactgagtgttctctattccttacttgctctgtggcttacagcctcagtttcctcctgtatagaaggagcattctattctagatgaggaaagtagttgcaaggattagagatgataatgataacaacacgattatatactgaaaacctgtgatattttaagctctatgtaggaactttacatgtaatatctcactaaatctttccaacttccctataatgtttgtgttaccgctttatcttgagacataaaaaacttaaagctcagaacaatcaggaacttagcctaagttccatggcaactcagtggtgaaattgggatctatctttctagcattataatacaagtaaagtgcctagcaaattgtctcatgctaataaatactagtaattttaaaacatttgtattattgctacaagtattaaattgtatagctgatgtctaaaacacataaaaatttaaaaatattgtttctgggatggcttaaaccgatataaaaatctgttatgacgtgtttgttcaggtgccttaattttcacccaaagaacttttgagcagagaatgcatggcctaagagaagctttgtgagtaaaagtttatagtcaattaagtgtggaaaatgcttatattttattcttcttctggagactttcaagaaacaatagcatattaaaggctccgagatgtcttgccataaagaaaactataatctagtttaacccaaagttttcacatgtacttaacaaagaaattccttcctcacataatatttataaccatctctttaaatcagtgttctgcagaaaacacttaggaggaatgaatctatggaaattcctcttccgagctgagcatgtaatgttttgactagtctttttctgccaacccagctccctgctgtagatgtgctgtgaaatgtcgaggctgacaataaacttcttctggcacttaactattaaaccgaagtttttcttaggcttttctcacaacagcacaacattctttctacttctctccatcctacagtcacaggtaaccatttcctgaaactcctgttcacagtatttcttagctcctcttacagagcagaccataacttctgtaccattcgatggcttccaaacttttgttaactctactttaaagcttattgtcacttaatttgtcatgtgcttatgcatccacaatcacattataagttatttagtgtctggaactgtgcactgcacttccctgtgtccctaaagtagcatgacagtgcattgctcattcattcattcattcattcattcaacaaacatgcaccaagcatcttccctgtgccaggcactattctaagtgctggagtatagcagtaaacatgacaatcaacgtcattagtaatccggtggaaatttatttgtatggggaaagatagataagtaaatattcaaggaggtacataactcatgtcagataagggtgagtggtatgaagcagttaagggcatgtgaatgaggaaaggaggagaggctgcttgagcttggaaaggcctctctgaagaggaaatatttaagcccggttaagtgcctagtaaaggctcagagacaggctgagtttgctaaattagaggaaaagcaggaaggccagtgtgactgtggcaaacatggtaagtcaggggagcaagatgagatcaactcagagtgggtggtgtgcaccacattgtggtaaggaatttggactttattttaagatgatacagaagccacagaatgttttagacatgggattgaactaagcatgattttataactttaaaagacaattctgactacagggtagaaaataaaatgtcaggagccaaggaaggggccagggaggccagttaaaggttattttagtaggcaaggcaagatatgatggtgatttggacacggtgatggcaggagagcaaaggaagtgggcagattctggctatacttttgcacgcgagacagtgggacttgccagcttgagcaaacagatgaacagaaatatttccaagatgcagatatttactaaatgcagatatttcctaggtaaaggttatctgggagactagtaagcctgggagaaaaagtaggggacagaatcaaaagttctttttcactgcattaaggttggaagtctgtaagatatctaggaatacatgtcaatttaacctgattctggagatcacaggaaagggcagggatatatataattatatttgggagttactggtacaaaactagtatttaaaaccatacgaccaagctcggcatggtggtgcttgcctgtaatctcagcactctgggaggctgaggcaggaagatggcttgagtccaagagttgagactatcctggacaacatagtgaaacccatctccacaaaaaaatacaaaatattagctgggcctggtggtgcatgcctgtagttccagctacttgggaagctgagacaggaggatcacttgagtccaggaggttgaggctgtagtgagccatgattgcaccactgcactccagcctgggtgacagagtgagatcctgactcaaataaataaataaataaacccatgggaccacaagaaatcatctaaggagagaatgtaaccccaaggcacctccaaatttggaagtagtataggctgagaaagggaagctaaaatggtaaacaggagaacatggtgtcaagaagtccaagagaataaagtatagctagcatgaaggagtggtcagctgggtcaaaatccaaagatttagatgtgggcagaaaaggaatctttggattgccaacatggaggcagcaagagcagggccagcagagtggtgaggactgaagatggtaagagttcactgaagaaagggtcagagaaataaggcagtactaatggggacacaaagtcaagagagggtttccctccacccccagaagggagatcctggagtttacctaaatagagtcagaaggagaggttaatagtatagaaaagagaaggactaattgaacatgtatatctttatctaattattgtcctttttttttttttttttggatacagggtcttactctatcaccccggctggagtgcagtggtgtaatcatagctcactgcaacctctaactcttgggctcaagtaactcctccatatcagcctcctgagtagctaggacaacaggcatgcaccactgcacctggctaacttttaaattttttgtacgttgcccaggctagtttcaaacttgtgacctcaagtgatcctcccgcctcggcctcctaaagtgctgggattacaggtgtgagccatggtgcccagcctaattagtgtcaatttttggatgtatttgatttacgttaggctgaatagggagttgttttcccaatccccaggacttaaaaccgggtggtaataataataagaatattagtttaacacgtatttagtgattatgtgtggggcattgctttatggactttacatatatattagctcctttattcccccaaataacaactgcccccattctacatttgaggaaaatgagacacagagaggttaaataatttgtctagtgtcatgtagacagtaagcatcagaaacaggattctcactcaaatagtctgactctgaactcttaactaccaggagaaagtggtaggaggtttcacagccgctggcacttcctcagttcaggacatgttttatgaatcacctcctgtcagttaccacctcttttcccaagggtataaggttatataaaaggatgaaagggtattgtttttcaatcctttctctggtcaggacagtcttccaagctggtcaaaccaattagatgtgtgcagcaattctttcaaaccagttccttttaggatttttataaatatctactacacataaacaattttttttcacaaaaaatttccttctgtgtacatattttgatacacatttacacattattttaatgctatatagtatgcaattattggttggggtgttccacaatgtacttaacacttcaactatgtatgtgtgtacacttatgtgtttatagaagaaatccatgttcttggcagaaaaatctgaaaatacagcttagcagaaaaaattccttcatttcatcatttaataaatatttactgagtgtctattttgtgtcatgcaaacttacgaatcatgctttcaaataccattaaaagcatgaagaaaatgcaaaagaaaaactgcaagatacaaaatatgcagaagatatgtggaaaaattagtaaaacacaaatcacacacatgacgagagagacagagggagaggaaaagattccagaagtaagtatatcaaacgtaggcagtagttattatttccaggtggtaggattagtatgatttttattttcttctgcttgcctttttttccccgtgtttttttataatgaacatatattacttgaatactcagaaagtttgtatttcaatattaagtatttctacatattatgttaagagcacatgcattaccagacatctgatttgctgctaaagtagaatatatgaaggtagtaacgcatggagtgtatgtggacatttttattgtttccattactcaataataagaagcattgtttaaagatgtgtgtgtatgtggcactacacaattatctatgctcatttggacagggacaaccaacatgaccctttacttcttgccaatagatctacctagcagagaaacaatgagatcaaagacacattttcaaggaaaaacaaaccctgaaaattcagatactttcttccgtctctttgtcaaggctaccctttaagatgtctcctttctttcctttttaactttttattatgtaaaatctcaaacatactaaaaaatatgtataactgagtattcaaaaatatatacaagaaaccccatgttcccatcacccaatttcaataattatcaacagtattaagaactttctttccaactgcttatcttgcaccagtaagaaatataaacttatgaacagaaaaaccatctttatagaaaacgattttaatcttaaatttaaaaaattgcttttaggccaggcgcagcggctcacacctgtaatcccagcactttgggaggccaaggcaggtggatcacgaggtcaggagatcaagaccatcctggctaatacggtgaaaccccgtctctactaaaaatacaaaaaattagctgggcgtggtagcaggtgcctgtagtcccagctactcaggagactgaggcaggagaaaggcgggaacccgggaggcagaggttgcagtgagccgagatcccgccactgcacgccagcctgggcaacagagcaagactccgtcccccgccccccaaaaaaattgcttttaaaagcctctgcatgtaaccttgaaacttcctccccaaagagcttctgaggcctgctgatgcagttactacctttcttatgcatttgcccttcttccataatagctacttgaatgcattattatacttagaaaatggaagaagcaaaataaagaaagcagcaagctgggaagtgtgaagccatcagacagaactgggggaaacagtgagcactcccccagggaaagtgtggccaggagggcagcctcagtatgagctgaggctgtggcctcatgatggggaggctactctcatttaatgagagatcacaggcaaggccagtggagtgccataaaactgccacctggttatacctacccaaactgttgtcactgctcgtgggccaggaagcaattctatccctcagcttctttgtacaggagttgtctgactttgcagaaagatctacttcctccttcctaatttctcgaacaagctgcatgcggcatcttgtgaaatcctgaaaggaaatcttcccattttcatctgctcccaactggttcatgatctcagccacagactcttccatattcagctggcgacagaccattagcaagtcatttctgcagaaggggttgaacagaagaaaatgtgttatgagtgacatttaagctagagaaactggttaatgaaaaaaaaaaggtatttcttaaatatattcacatactagacctattttcaactttctcattgtttctagaaaagtgataagtgtatgaaaaaaacgtgttccatttgggttattctaaacaaaaactctattatttggaatggtgaggcaacttttaatcttttgttctctttttcttcctgtttccacacccttctctccctttctttgttttgaaattgaggattataaagttctttctttacacctgaagagcatagcactgtaatctcactgtaagataaagtttcagaacatagaacagacattatttctactcttggcagagtccaaaacctagtcaagttataaaagaaccaacagagattttaacaagcttgattttcagctttctggaccaatcagctaactttagtacttgtttaaaacatcatttaatcttgactttcgtggttcaatgcttagctacctttggtttttcctgcttttgagtattttccaccttcccacaagcaatcagtgagccctaagactaagagcagggatcaaaatctcaatgtcttccaggactagatttaatgtaaatgtgtgcagtggatagatctaagataagagggcttggtggggtctgtggctggactagagaagtgtatccagcctatagagtctcaaatttaaaaaaagaaaaataaaaaagaatttcaaaaagaataacaagaacaataaccctatgctgaccaagaacatttatgtggaggacatcggtttgatccctgacatacaagtcttgttcttttctctctacctaacctcctttagcaaatattttgctcatattcctccaactgcaggtttcaacaaaggtcaaaggactgtagaatttaagtgctggaagagacattagaaatttgttcattgtcacaaacaaagctaattagtgtgcctgtctcaacatactaccaaagttcagttatctggagaatataaccagtttgatgtttgctgatacctgaaacctaatcatgctaagaccactcttcaagtcacccttcacaaattctatctcctggtcaatgtcactatggtctctctcaaattccctaggctcacaaaattgtgggcatttttaatatcttctcattcactcctccttatccctaattctgtgccctgcactcccctcccccacctctgcccttgtccccttccccaagtttccagggtctgagttatcatcaaatttaggttagtcttctccccgaaatgcttttatacttgctctttatggtgtttctaaataaatgtaaaagactccaagacctttcaatttatgccaggcctatgccaccagcctttttagctcatcaccctgcttccatatgctatcccattttcatgttttataaagaatttttacacatagctacatgttttatcttctgtgtacatgtgtgtctgtgtccatatgtatatcatatatatatatatatatatgcctctgcatctgtgtatacacacatacacatatacacatacacatatatttgtaaagtagatgcatgaggataggaataaatatatacatggaagtgggtatggcaggttaaattattaatattagtcctaatttttcattatcccacagtagtgttataaaagtatacccttgccttggtctcagggccaaggacattcatggtaggtgtgtcctttcccatcccttaacttcaggcttcacatctaacttgctttggcccctcggatattactggacaagtgcctatactgttgagcttgtccccttttgcttcagtcatcattaggagaaaaacataccatggtagccattatccctgtatctagcctgggtctcaaaacaagccaccccaatctatctgaagactcatagcttaagaaaagtcattccagctgaccccaaaatgtgtgatcaaaagtaagttcttattgttcatgcaaattaaagttcattcttaagctcagattttgtgatttttcttccatcagtagctaatcgataaactggaaaaatgtttgtttggtttttaaagtaatattttcatataatattttcatataagacctacctgatattcagccagattcatccaagagttagggatgattaggattgctaaagcaggaataccaacagaaagaaaggatcctgcttttactctgagttcagggttcagattatactttctaaaataaggatttcttttttagatatttagagaatagtcttaaatttaggcttagcaaaaaataaagaggttttccaaattctagaagttcatgtaatgttaacattaatattctctgattggtaaaaatatggtgtattcatttttcctgtctgtgtattttcacttttcacagtgtattatactactttcataaattgatatgtcattgtaggtttaaaatggggatagtagtagtacctacctcatagggctgctctgaaaagaaatgaaataatacatagaaagcacttaacatagttcctggcacatattaagtactcaataaacagtagccattattatggttgttttataattgttgatcatagatctttcataataccccagtttcatgattagggctttaaaaatgaattgtgatctgctcaggggaaaagaatactgaacggaactgactacctcactaagtggtacaatctgtccacagaggcccacccttcctccctgctggcagcccacttacatatattgggcaccctggtgagaaactcagctctatccaggcttgagaagccccattctacaagaaacagctgcaaagaagtaactgtggtctagaaataccaactcagagtagaatgtgtaacactgaattttaattttaaacgtgtaggctgttgagaggctgatataaaagatcaaagccaaaatacattcattgcactctaccaaattaagtcaaattgtaagttttaaatagaagtactagtttttaaaaactaaattcaagctaaattctttcagtatagaaatacaaaattaacaataataactaacaagcctgcaggggaattacaattatcccctgatatggtttggatgttcaccctctccaaattccatgttgaaatgtaatctacaatgttggaggtggggcctggtaggaagtgtttgggtcatgggggttaatccctcatgaatggttgagcaccatccccttggtgatgagtgagttctctccctgttagttcacacaagagctggttgtttaaagaggcctgacacctcctcccccaccttgctccctctcttgctatgtgacatgctggttcccctttgccttccgccatgattggaagtgtcctgaggccttcaccagaagcagatgccaacatcatacttcctatacagcttgcagaacagtgagccaaaataaaccttttttccttataaattacccagcctcaggtgtttctttacagccacgcaagaatagactaacatgtccccattttacagattatgatatgacagttgaaagagtcagagacagtatgaggcacagcctggaaatctaaaccaaatcggtctgattctagagctcttgccctttccatgctatcatctagcatctcggacattaataacaggtacattttggcatgagaaaacaattagggacagcactaacatgagcagcttgattatcaaaggtcatgaattaacaacgcttttatatcaaaccagaaaattacaatcatctatacatgtgttatccttctatgttacacatgaatgagaatataaagttacattttgttaccaacaagatgagaaaacaaagttacaggagaggaagaaaattataaaagctctcctttatatcaagagctaagtctggagaacttgaatcgcagggtatttccatacgccaccttgccaggttgttacaaatggccttcaatgacgtacagtcccctgtgactatgcctctttacagcatgcctttgccattcctcccatcaataggtggaggctatttccctgcccttgaatctgggctggccttgagactggctttgaccaacaaaatgtggcggaaataaaattctaggattctgaacacacaggcctaaagacaccttctagcttccaatttcaactcaatgccttccacttccatgcagtcctggcagcctgctcagccccatggtggtcttttccttctgataacatttagtacctgcaccagtcatttggtgattatttacagttttgtgacagcttttggactgtacttaactttgatttctttctctctttctctttttaaaaattgttttcacatattcaatccttatcttcccaatatgaccatgagctcctggcagccagtgttgatgctacgtcaattccctttgagatgtgtgcagcacccagcacaccaccacatgcacagcagaccccatcacatttgttttgatggaatgatacttaaactctcagaagttgaaaatgatctttcttttaaagagggtccccactttggatattttccaccatatacctgtctttgtattttcccacataatgcagcacatgggatgctcagtaagtatgaaggaccaatggcctccataaaacactaataaccctgtagccttagtgacagaacagcaggacatttctctgccctaggcaaggaaagtttttcagaggaagagatactaaattgagactgtccaaaactaagatagtccagcagagaactatatcagtagcaataacaacatcatgtaagtgttctgccttgaaaaaaaataaaacttttgtatattatttcagaaaacacatattcattgtagaaaatgtagacaagcagaaagaaaatacagcttacatgcaatccctttacctagcaataaccacagtgaatatctggtgaattacacaaaattgtactgaacattttttcctctaagtcgttattgttacaaatgctttaaaaggtgtttcatactcatattcatgcacatatatcttatcttcagatgatatcatcataacatgagaaagaaaaagacctcagtttgtatcagaggagctggccaagtcaggcaatatttagctcttagagaacaccaatcaccagacagcagaactaaaatgacttcagtcatttcaagattgatgcttctcactcaaaactgcatggtttcacaatgaacagctattattttctatatataaaagtcttctttttctcttggctattcttcctttaacttataaagaaattgagtatgaagtgaaaattcagtaaaactatttgtcattcaagtaaattcgcagcctaaccttggggatgtataatgggaaagatgggctttggtctctcaggctcaggggcagagaaaaacactattcttccccacaatgataataaatcccaaacccagttggaatgagggctatacagaggcaatttaagtagtaggttgcatgcttttgttcgaaattctcaactaacagagacccctggacctagtaggtagtccagaaatagttgctcatgaaagactacaaaaaacatctaaaaacttattttgccccaaatcttcaatttgagtcacacaaaaaatgtaatttagaagtctctaatttcagttctacaaatattgaaagtatgaaaattataattaggtcataaaaagtaacaggtttccgggctatagttggtaatttctgtgtacagctgttgaacggaataaatgcatttgcctttctttcatcattgcttcttacgaaataagtagagtgaagtacaaaacaataagcaaataagcaaacaaaaccatatttaagaaaaaaggagaagaagttattaaatataggaaatttcaacaaatttcagagagacacaaaagagatgggagcatgatgatggatgatacaggcgctagaaatccttgcctagaatatgcagcaggggagctgctgggtggtactaaaacgctgaaggttctgggtttatagccagccagtgtgatgaattgtgagaatgagaagtggggctgaaaacagtggctgtacttccttttcctagcatggaataaggagatattgtctaaagttggtaatcagggttgggcatagtggttcatgcctgtaatcccagcacttttaaaggccaaggcaggaggatcacttgaagccaggagttcgaaactagcccgggcaacaaagtgagacattgatcttcacacaaaaaattgaaaaaattagccaggcatggtggtgcacactgtagtctcagctacttggaaggctaaggcaggaaggtcacttgagtccaggagtttggaggctgcagcgagctatgattgtactactgcactccagcctgggtaacacagcgagaccttgtctctggggaaaaaaaaaaaagctggtcatcaggatacagaagtattagcatatttttccgtgttacggaagaaatgatcaggagaactagaagcacaaatggtaccaagactttgcctctggggactgggcatgggtgtggagagggaggtagggtaggagggttgtgttttgtcacaaactcttctgtacaattttattttgttgtttcccatatgcatgaatagtttttattaaagtaatgttttcaaattttaaaaaaccaaatagattattaatgtaatttgagatatgacaaagattgtatttagataaagaattccacaatgcaataaggaaaatataacaacccagtagaaaaatgggtaaggctaggcgtggtggcatgtgcctgtaatcccagctacttgggaggacgagaagggaggatgccttgaggccaggagttcaaggccatagtgagctacgattgcctatgaatagcaactgcactccagcctgggcaacaaagtgagaccccgtctttaaaaataaagaaaaagtaagaaaaatgggcaaatgacgtgaacagtcaacagaaaagaaaaccccaatggccaatgaagatataaaaagattcctaacctcactaagtataaggaaaacgtaattttagaaactggatgccattttagtatctaatggattgccaaaaacattagtcttacaataccaagtgctgacaaggaaacagaaactttcacatggtattggtggaagaaaagctggtaccacctcttgagaggactttggcaacatctaaaaaaaaaaaaatagactcaagcatacccttcaaccagaaattcaacttttagttacatgtgctcaagaaatttatgcataaatggaggagacatgaacaatatctgtaacagcaaagaattgagaagaggttaacaataatattaatagtcatatttataataatagctaatacacactggatgtttattgtatgccagggcttgagctactcctttatatatattaattaatttaatgctcagaaccactccatgaggttggtaccattattatctccatatataagtgaggaaattgaggaacagagatgttaaataactagtccagatgcctatcaacagaaaatacgtatatatacaaattgatgtggcatcacataatgaaatacaatagaatgtaggtttgaaagaaatgcatctacaatgtatcatcataaaaaatctcaaaaacagtagtgagtaaagacatcaagttgaagaatgacataaacaatatgacagtattaatcaaaggtttaaaaatatacaaacaatgctataaactgtgtatagatttacacataggcaagtaataaaaacaaggtcaagaagcataaatctcaactgtaaagaggtgagagagggagaagaacaggattagggaaaggcacaaagggggcttgacatgcatttgtaatgttgtttttaagagctgtggacaaatataataacttctctgcaatctgggtatggtacatatgtgttaattacatactctgtaactttcaatatttaaaatgtctcttaatttaaaaatctaacatatatataaagccgattcaaaataagtttggtctgaggctatagttggaggggaaaatgtttaaaataatgtcattcatatcaataagtgtttacaggagatgacccttggagttaatcaaattagatgaatgatccaaaatgtcattttggaacttttgttcatccttacagactagagagcatctggttattttcctggtatgactttttaggagtggaattactcattgttaaaaggttcaatctctcaatatagttttctcaacatccttcgagaaacatcagatttatagtcccactagcagtgtctgagctgctcacgctttggctatgtttctagagacagtagtctaattccctacatagagagtattccctatgtcctcattttcttttctgcaaaggcattcataacatataatcccagagacacatttctttctttctcttcagtgcttaatgccgactgctaccttcttgaaactcttccttcagtctgttaaactctgtcttctggtttctcccatctctgtatgaaaggtccatatcagaattcttgtccttaaatacatgctatcttagagtcatatccttggccccctgttttttcactctaaaactctctacagataatctaatctaaatctgtggctttcatctaccactatgtatggctgactaccaaatttctatcttcaattaagtagcaatccattttctactgggtagatacaattgactgtcatatatttatcttgaactcaaagtcctgtgcttaattcatcatctcgtaccctttcccaaattttctccttcaacctacataaattataccatccagtcacccatgctggaaatctagaagttatctaggatgtttctttcttggttatccccatactcaattaccaaggactggagcttttattgtctaaatagctctcacatccattccgtcctgatcatccctacctctcaacattttccacctggtttactgcattggtctcctaattggtctcactctttccaacaggcagccaacaaattctgttactctttcctgcttaaaatcctttatttgctccccacaagacttttagcttcatacccaagtttctcacttcatagccaaggcccatcagagcatagctgggcctacctctctagtctcatcttcttgctgaagtaggtagccttcattccagccaccaaatttcttttagcttctataaacggtcactgttattttacatgctcctgctttgcacatgtttgtccctctgctcagaacatccttttctttccctttcttcaaactccagcgcatgtttcataagtcacttgaacagcgtctccttcagaaatcttctgtatctcacataactcccagtctaatttgatagctcttcagtatcttatcaaagtaattgctcaagcttcgatcacttaccccactctatagtaatgactgatttattttatctcacttctagtaaaccagaggttggcaagtaagacctgcagccaaatctagatcatttcctgtttctgtaaatctagtttattggaacagagcatgcccatttatctatgtaatgtctatgactacttttttgctataatagcagagttgaatcattgtgacagagaccatatggcccacaaaaccaaaaatatatactatatgaccctttacagaaaaagtttgcaaatctgtactaggctgtaaattcctagaggacaaagttcattccttgttcattatctttgagtctgtaacacctggtatacagtaagtgctaaataaatgcataacaaataaatgaatacgtgggtaaatataatgttagacttgaggtaaaagaggtgaaaagagaacctaaaacatgaaaactttaatgccatttctcctgtactttttgcacacttcattttgcaatcacaaattaaaacaaaacaagttgatatcattaggtttttaaatatcttctagtatatatgtatgaaaggaaaataaaaacttgggaccctaaattcactatgccaaaagaaaaaaaaattaagctgaaagctgagtcatgcaagaagctgcctttccttttgttccaaagaagatagctacagataaaaagttaaatatctccacaggtagctactctatgttcaccttatcttatttaaagtgccaatttactgagcaccaggcgtatatgtaattgactattcccctacctgctccttttctcttgcaatatatgaattcagtaaggtgaccataccctccctctttccccccaggctgctgtttccctttaaatactgaaggcttcaaaatccatgcacgcttaaccttggcaaaataaacttctaaattgattgagacctgtctcagatactttttggtttatatatgctgagctccataccattcaagtcagtaatctaaactttctatataaatagatattaattatgatgctcaactcttcataattgcctggggtgattaattaaaatattttgatgcttatgctccatggcccatgcaactacatcagaatggtgggggtgggggactgggaaatgggagaggggaaggcagcatcagtatttgttaaaaggcttcctaagtagttcagagaacttctgtcctatatcaacagtcctaaggaatgagggttttcaggacactcaggagtcttagtgatcaaaaacaaacaaggctgggtgcagtggctcatgcctgttattccagcattttgggaggccgaggcaggaggattgcttgagctcaggagtttgagaccagcctgggcaacatggcaagaccccatctccacaaaaaatacaaacattagctgggtatggtggcatatgcctgtagtcccggctacttgggaggctgaggtgagaggatcatttgagcccaggaggtggaagctgcagtgagccctcattgtgccattgcactccaacctgggcgaaagaatgagactgtctcaaaaaccaacaaacaaaaaaaccgagccatgcacagtggctcatgcctataatcacagcagtttgggagcccaaggcgggcagatcatttgaggccaaaattcaagaccagcctggccaacacggtgaaaccccatctctactaacaatacaaaaaaaaaaaatagccagatgtggtggcacacacctgcaaccccagctactcaggaggctgaggcagtggattgcttgaacctaagatgcagaggctgcagtgagttgagatcgcgcctctgcactccagcctgggtgacaaaccatattgtggtcatttaggtacttgcaagataaaataaaatagattattttgaaaaaaatcctctatagaagtaggaaaacaaaaggattcctctggaatttaagctccccaaggatggagaattttgtctattttcttcactgttgtattcccaataccaagaatgatacctggcatataataggtacttggtaaataaataataaatgaatagcaatttcttcttttgcttttgatcaaccagaagcccatgattccaaatattccacttaactgaaattttacaaaagaagaaggcaacctggcagatacagtattcagtgaatcaacagataactttctttaggggcataaaaattatattctacaattgaaaatggagttttaatgttaaaaagggaaaccagagagacactgctatggataaatgcacctcagcccctttttaaaattcagcttttaatttaaaaaaggtcagctgtagtctggaaacacatgtgataataacatgaagagttatgaaggaaagggaaaatcaattccaacattacctaaacaaacaaacaaaatgccatatgacatgcatctgaaggaattaactgaattcatcttggctcctcccactgtcttaaagcactcaccaagtctgccaaagtaattaacatcctacactggcatgacgttgagcccatgcattcgttctctctcttactctgtcactctgcatttctaataaaacattctgctagaaatgatgaaactattggtctaattctcatatctgaaaaaacgcttttggttgtggttaccaacttgaaaaaaatacagaaaaataggaaagacaaaacaaaaatcaagattgaaagaaagaataaacattttaagtcacctaatttatattataaagattatttttgaaatgtcaagcctaatggaatattgaaatataagctttttcaatggggaaaagactccctggtcaataaatgatgctgagataagtggctagctataagtagaagaatgaaactgtccccttacttatcaccatatacaaaaattaactcaagatggattgaagccttaagtagaagacccacagctataaaaatcctagtagaaaacctaggaaatactcttctgaacattggccttggaaaagaatacatgactaagtcctcaaaagcaattgcaacaaaaataaaaattgacaagtgggacctaattaaacaaaagagctgctgcacagcaaaagaaactatcaactgagtaaacagacagcctacagaatgggagaaaatattcacaaactatgcatccaacaatggtgtaatatccacaatctataaggagcttaaatcagtgagcaaaaaacaaataacttcattaaataatgggcaaaggacatgaacagacacttctcaaaagaagacacgcaagtggccaacaaacatgaaaaaatgctcaacatcactaatcatcagagaaatgcaaatcaaaaccacagtgaggtaccatctcacactagtcagaatggttattgttaaaacgtcaaaaaataacatttgtcagtgaggctgtggagaaaggggaatgcttgtgcactgttggtgggaatgtaaattagttcagccactgtggaaagcagtttggagatttctcaaagaactaaacatggaactattcgacccagcaatcctattactgggtatatacccaaaggaatataaatcattctaccaaaaagacacgtgcacttgtatgctaatcacagcactattcacaatagcaaagacatggaatcaacctaggtactcatcagtgatggattggataaagaaaatgcacatatataccatggaataccatgcagccataaaacagaatgaaatcatgtcctttgcagcaacatgaatgtagccagaggccattaacccaagtgaattaacacaagaacagaaaaccaaataccacatgttctcacttataagtaggagctaaacaatgggtacacatgcacataaagatggcaacgatagacacttgggagctactacatgggagagggaggaaggagatcaaaggttgaaaaattattgggtactatgttcactatctgggtcatgggttcaattgtatcccaaaactcagcatcacgcaatatacccatgtaagcttttttgtaaaactaggatttccaataagcaactttctcaatattctttattttgaaacctatttcaatttattttgaagtctattttaaccctgggaattagtatttgtagtcttgaactgtactgttcaatatggcagccactagtcacaggtggctgtttaagtttacatttaaattaattaaaatgaaatataattaaaaattcagttcctcagttgtactagatcaacagccacatttcagatgctcaggagccacactggacagcacaagtatagaatatgttttgttcatcacagaaagttctaacactggaaaaaataaaatagtctacaatatcttcaaatagcttcaggcaatagtatcagttaaggaaggagattatttaaaatgtcagttattggccaggtgcggtggctcacgcctgtaatcccagcactttgggaggccgaggcaggcggatcacgagatcaggagattgagaccatcctggctaacaaggtgaaaccctgtctctactaaaaatacaaaaaattagccgggcgtggtggcaggcacctgtagtcccagctacttgggaggctgaggcagaagaatggagtgaacccgggaggtggagcttgcagtgagcagagattgtgccactgcactccagcctggccgacagagcaagactctgtctcaaaaaaataaataaataaataaaagtcagttattattaaggttatttactaagttattattctaagtaaataaggaaaatagaagcttttttcccctcagaacataaaaacactattataaatttgttagtattttgcagctgattttctaattttggattcatttctacttatggaacatataaaaactactcactttttgattaaggaaatcagattcaaattcatgtccaaatcaccatccccttatgaaaacattttggttgaaagatttataggacttctggggcaagcagaagggtaaggatgtttcctagagaaagcaccagctttgccttcttagatttgagttactgcaatactaattccttctgatgtttggcctgaactttctaagaggtcacagaaataatgaatagctaagatcattcactggcatgatagtttcccctttccaggtgaaacgtcaagaatgactaaaagccaacattcaagaagacagcatctgcaaacaagtgaagtattatgtttacatgtttttttaacagctttttattctatagttcttttacatgtgactgtttcctaatattcttactctttattgttttggccctctccttttttactttttttttttttttttttttttttttgagatggagtcttactgtgtcgcccaggctggagtgcagtggtgcgatcttggctcactgaaaccttcccctcccgggttcaagtgattctcccgcctcagcctcccgagtagctggaattgcaggcgcccgccactatgcccagctaatttttgtacttttagtagagacagggtttcaccataatggccaggctggtctcaaacttctgacctcaggtcatctgccttcctcggcctcccaaagtgctgggattacaagcgtgagtcaccgcgcatggcctgttttggctctctcttaatttgatgtttcctattgacactgtagtgaaagaaaatactttaatgtatttcccccttggattatttctttaaatcagtaaattaacatttggtattaagcaagactcagcctatcttcacaatgatttgtaaaaacttctcaaaagcagtctctgccattcttggggaaaaatactcattcagaggctatacaaagtattttagatatattttttcatttaattctcacaatagcagatcttattttcattttacagggtctatcagtgccttgtaaaaggaaatctgtcccaaattcctggcaccatacttggtacacagcaggtacttaaacagcttggtggatgaatgaatgaacaaagagcacctttttgttaatctcagtgacagatgtagaatcttacagtgagcactcagtaaatcctcactaattgaatattctagcaataatggtcagtatgacaaatgagtaagtagctcttaatatatcagtgtccttccaaaaatcccactaaagctaagcaatggaccccagatccaaacattatgtaaggcagtcatgtctgaaagatatagaaagagggaatacttggaagagacctaatacataggttttggggcaataaaattatttgggaaatgaaccactttttaaaaatttatttctaagtgtattttaataatacttccagaatagttattccttcagatcatttcaggtcacactttttatgggaaaattacacacttaacaccattattataaaaagacaattgcacccaatttctttcaccagggtaaaaagatgtatattacaacatgtatttaatatataaaagattcacagtgtactgtgaatgataaacttacaattatgtttattttttccattgtaaaaaaggagtaaaggtagaagataaagcaaaatttttcactaagtgctactcaatagaataaccaagtctaagcaatgttttaggctaggatccaaaggtgtacttgacccctggctctttaaattgaagtggcccatccacagagcctgctaccagccttctcaatcctctgtcccttggtcccattgtctttctcatttagcagccttctcagtatttcttgcttcccacatcatttgaacctgtatgtctgacctccgaacctccagactctgctcacacagttagggactgttgcattcatactgagaatagatgttcccaatgtttattttggctccttgggtcttaccttggcctggacagaaacctaaacctttccctgaggctgagactgtgacatgtgcaaatttccccaggttttcttatttatatatatatatatatattctcctctagaagttaaaaactttatttttgtatttttaaaattttacatatttttaaaattattattactatttttttgagacagggtcttcctctgtcacccaggttggaatgcagtggtgtgatcatagttcactgtaacctcaaactcctgggctcaagcgatcctcctgcctcagcctcccaagtaggtaggactatgggggcacaaaaacacactcagggccgggcgcggtggctcacgcctgtaatcccagcactttgggaggccgaggcgggtggatcacgaggtccggagatcaagaccaccctggctaacacggtggaatcccgtctctactaaaaatacaaaaaattagcccgacgtagtggcaggcgcctgtagtcccagctactccggaggctgaggcaggagaatggcgtgaacccgggaggcggagcttgcagtgagctgagattgcgccactgcactccagcctgggcaacagagccagactccgtctcaaaaaaaaaaaaaaaaaacacactcagctaatttttttaattctgtgtaaagatggggtcttgctatgatggccaggctggtcttgaactcctggcctcaagtgatcctctcagcctcccaaagaggtgggaatacaggtgtgagccactgcacctggcctaccaaaaaatttttaaaacactcagcacatggaggattttttttaatttcaaagtgaccacaataaagttctcctaaatatcttccaaactactttagttttagaaaatggcattaacgcaaaaataatatgggtgaaatgctactttacacttttttaagggttaaaaaatgcaaattgttttcatgtataatattctgtcttattctactcactctctcagattataatcaaaatattatagcacaagaagcaaatgagggcttgtagtctgattacagaaaggagaaggaggagatttaatgcagcataggcagcagcctcaggcaagaaatgttgtcattgtgtctcacatcctcaagtattacatgaagatatcgtccaggctggagggcagtggtgcgatcatagttcactgcagccttgaactccagggttcaagtgatccttctgcctcagccttcacacccagataatttgtttaaaaatttattgtagagacaggtcaatttttaatattagattcaatgctgccaaattgctataaaagatttgaacacttttatgctttcagtgttcaaagactttcatagcaatttggcagcatcttgtacttaccttgctgcagattggcaagaaaagactagtctgtggcccactctgagtagcactgttctagatgtcatgaatatggctaaaactatcccttaccttatagattagagaccagtgtgggaaggaatggcacagaacagcaacaatgccagtattagccatggtagcttgccatcattgtttactttgacgtaccattctaaggaaagtaagtgcacactgtaagaacatttaagtctatttcagtattcgtaaacactgtactggggaaacaactcatagtaatgccatcaacgttttatatttaaaatatacctaagttaaagttaaatcccagaaataaaaaatccttcaactaaccacgatcacatatttaaatgagtactgtgaactaggtgttctacgtaattaaacaaaaggggctcttcatgtttcagaaatttgtagtacaaatcatatcacagattataaagcattcatcacaaggaaggagcttcttctggtttggcctggatctgtagtgttacaatagtggctgagagagaggtggtaaagttccagccggagtaataacaagctgtttggacaagaaggagagaagaggaaggtgggaaatgaaggaggaaaggaagcagcagagggagcgagctgtaagcccccagcgggattgccatcagggagccagacccaggggtgagaatgtgaggtccagttagtggagcggctcaatggtaaagtgatagctacatgacaccaccaacactttggttttaaaaatgtcaaaacttcagtttgtttctttttttctttttttgagacagagtttcactgttgtcacccaggctggagtgcactggtgtgatctcagcatactgcaacctccgcctcccgggttcaagcgattctcctgcctcagcctcctgagtagctgggattacaggcacgggtcatcatgcccagctaatttttgtatttttagtagagatggcatttcaccacattggccaggctagtcttgaactcctgacctcaggtgatctgcccgcctcagactcccaaagtgctgggattacaattgtgagccaccacacccggcccagtttgtttctttatttgagggtgagaagatcccctcctataattttgaagtcaaggaaacctctctaatgtttctttgcactgccaaaattcacagctctgaaacatcaacacttcccttatttccctcatctatgaggaaacacatagagaaataagtctgttttcttaaaagcaatgccctcaaatggctgtaaaagaatacagtggccaggattgtgggaaaatgagtcctggtcacagacagaaagtcaccaatgtaacactgtggccaagttcagaaaaaacgcccaccagtgacaaaggccagatctaggatataaaagcaaaggtcactctcacagcctgctgcaacattcactgcagtttggcagtctttgtcaaaatcaaaattgtacttgcttttcttttggttcagcgattccatttctagaaatgtatcctagggatatgttgatgactgaacagagttattcaatgcagcactatttatattagcagaagactggaaatcatctaaatatccactgatggaggcctggtaaataaattatgctccatctatacaatgccatgaatactaaacagtcttccaaaataacaaagcagctctgtataatggtggcacaacatccaaaatcaatcaagttaaaaaaaaaggcaggtgcagatcagtgcgtgtcatacaatgatacatacaaaagtagtagtaaaatatgtatctgcaggacttgatgtgcacagactacatctggaaggagacctacggagctgttaccagtgactgactgtaaaaagaggaccatgtctggaggacagagatgggacagaagcctactctgccactaacctttttgaacacatttgaatttttattcatatgtatgtttaaggcattttttaaaaagctacataccagctctatagtggcagtcagcatcctgatatctaaaaagcaatgttagagaaaaataagccaaggaacttagctttggcatccagtgccctgccaagaagaaaaccaaatgcctccttacagtagatcagcttacaggttattccagttattatcctgtcaagatattttagtagcttgcaatttacacttggccttgacagtagttcccttcagttgtccaaagtgtatcagttaatcttctgcaggtgacttatgtaataagagcatcagtatataagatatttaagcaggatttaattacctggtagttggagagaatttgaattcttttcactctccaaattttgtaaagataaaaaaggtattaaaatctgccaggcaaggtggtttggtaggaaaaaacagatgaaatatgctgtgggccaggtgtggtggcttatgcctgtaatcccagcactttgggaggcagaggcaggaggatttcttgatgccaggagttcaagactagcctgggcaacatagggagacatccgccccccaaccccgatctctacaattttctttttaaaaattagccaggcgtggtggcatgtgcctgtagtcctagctacttagaaagctaaggtgggaagatcctttgagctcaggaatgcgagcctgcagtgagccatgatggcaccactccactccagcctaggtgatgagcgagaccctatctcaaaaaaaaaagaaaaaagaaaaaaaagttgtagttttgtaccgtaaaaatacttattaatattatttcaagtatttagcatatgtttacatgactacattttccttttgagcatcactctaagattttcaatgcaaagcattattttcctcctgatgatcagaaaatcaaaatgctctctctactccatcccccttctaaataattatgtctcaaaagcggcacaattcaagggctaattacttccaaccaatatataaattaaaagttcacaggttcatcttagaaataacaaccgagaaagaacattcaaacttgttaaaagccttacttcttgcctgcactattgaatgtgcaatttgttcatcctgagaaattatgatgaagttaaacacaaacagcactaagttaattacaaacaaatcttcttctctgtaatttacattctagaatccagctttacaccattttatttccttccagctgaaggaaagacattgctagcttaagattgtcttggatgagatctctgattttaataaaaaattaaggcagtcacaaattcacttatgccatcgaataataattctagtcccattggagagttatctaaaatgacccaaatcagccacatttctgttggcatataattaactcctgcccgtataaacgtaacgcagattctcctccaggtgaaactgtcctggtcctctgccctctccactgaaccagcaataaaaagagttctctataatcctatttgtagtctacatctatactcactagtgaaagtataattaaaccatcttttttttcaaatcgatctaaatatagctggctattcattcagaataatatttgaaaaacacttttcacttatagaaaagcaaatgaggaacaaactaagaagtaaaagataatgtttacatttgagactttaaagttacacgcaccttacaaagagaatttagagtcactgatatcctaccagcaggttcaaccagaagtcctgcatgcagagaacctcagtgaggtttgcgtggatctccaagaagagatttcaaaggtgggagcaagtgccatccttaggcctgccttaaaggttctacaccccttgagcctggcccatctggctcaatatcaattgtagcagaatagataagtaaataactatttatatacttagtgagaacagatgcagcccctaaatataaatttggaaatcctgggcaacataagaagtgcttataataaactgcttaagataaaaaggcagaaaaaaaattgttatctacagtgcttataactctagagtaagttaaaataattattatttattggacacatactttgtgctcagcaattgacataatcctcttaataaacatgcaaagaggttaagtaacttgccagctataaagcagttgagctgagactgagttcaaaatctagctgatctcaaaggaccgacaggaaatgttaaaaaatgaaaacactttaaggagaaactgggtggtaagtgtattatggcattaggcagagtggaaagcattctttatgctcagatagggtgaaatcctacctttgctattttctagatgtatgactgaacctctctcagtctctacaactgcatctgcaaaaactgcaaaaactgggaccatttcctattcaggataatatctgagcaagtggtgagccagtgtctcccctacagcaggctccacagtactgctcctgtactcactccaccaagcatcacctggttaaataattttagacttgcaagttatctctgcattcatttggttaaactccctcatttttaaaaatttttattttgctttgagtcctggaatacatgtgcagaatgtgcaggtttgttacataggtatacgtgtgccatgggggtttgctgcacctatcaacctgtcacctatattttaagccccgcatacattagctatttgtcctgatgctctcccttccctcgcacctctcccatcccaggagcccctgtgtgtgttgttcccctctctgtgtccacgtgtttgcattgttcaactcccacttacgtaaactccctcatttttaagagtaggaatcttgaaatgaaaacttagcccagacactgagttactggctagttagtgccaaaactaggactagaatttaggtctcctaacttctttccacctcattaagaggcctagttagaagaagggaacagaggaaaagcaaagggagatacattaacacaatctcctgatataaccccagcaaacaacctcaaatcatctgaaaggtagatatctttcatacaacctggacagataaggttcctcatctcacttcaaacactttaattagttggtttctcaaagtacaagttgtaccccttaggtctaagatagaggaaggcaaacttctggagcaacaaaaataaacttaacatatatagttttgccctgtgtctcagttttcctgaattctatctctggcatacacatgacactaatttccatgtttgttctattttcaaaagaaaaaagagggaagggaaagatgttctgggatcaaatacgagatctttttcttggagatacaacatgtactgtattatattaaacactacaaactttaaaggaaacttgttaaattcttttcagcccaatctttacctgacaatgaattatcctcactggcctgttgagtgtgaaacaaatgctccacagaatatacctagcgctgaggttcttaaaatgtagtcgtgagaccagcagcatcagcatgacctgggaactggttagaaatatgagctctcaggtccaaacccagacctactgaatgagactcctgaagtgtttcccaagttctccagggtttcgattagagctaaaggttgataaccacaaatgtagacaaatcatcaaggtggttttatcatgaatattggttgttttgggggttctcctaggggtagtgctttcaaactgctccttaggactgagtagagcaagggagcaggagatggatgaacatgtaccaggcttcagggcagatggcctagcctgtccctaccatgtttgtctgtttcatatataaggctacagactaagtaaggctttatttgaatgaagttttcacagcttaaacaaaagtttgaaactcactgtttagagattttaagcagcttaggacgtggatcaattttagtgcctgctaaagagtaataaatgccaatttatcagtcagaggatcctttggtgcctttaggctggaatagaaggaccaggggccctgaagcaacacagagatcgagattcccactgcattaccctatatttgtctttctcctctgcacttaaaaatgtaaaatgcatattagcacttgtctggaatgtggctaactataaaagacatttcgggaaatgtactctgattttcatttccagaccttcttaacataaattgaagtcttatcacaaaagccccattctcataaacaacaaaaacgcaacatccacagattctattaataacactgttaaatactttttttttttagacagggtcttgctctgttgtccagcctggagtgcagtggtgtgatcacggctcactgcagccttgatctccttggatcaagaaatcctcctgccttagcctcccaattagctggaaccacacgtgtgcaccaacacacctggctaatttttaaatttcttgtaaagatggggtctcactatgtagcccaggctgctcttgaactcctgagctcaagcaaacctcctgccttggcctcccaaagtggtgggattacaggcatgagccagtgtgcctgccttaaatatttgaatgttacacataaaccattaggataattcttaccaattaagatttagtaattttaaagaaaaataagaatcatgtactctctcattcccaccccactccaatactaagggcaatttatgcatcagatagtgaggacaaggatatttagtctctgtcccttcctagactcgagactacggtctcacattttgtggtcaaaaataaaacatatgctcactataaaattttattttaataaggaaaataggaaaagcaaagaaaaattatttataatcatattttccattaaaaacttgtatattcttaaagacactgttccagggaaatatctatatattgatagatacagaaatatagttctacacttatgtgtgtggatctgtctatgtaacggaatttatttctcaaatgacatacctatgtctctgtctccgtataacttcccccaacgggatcttgctgaacatactgttttataactagtgtactccatgtagcaaaaaatcataaaaacctttccgtgttaagaaatatggttctgcgtatggatatgctatacctatacaagggataccttgtggatatccattatggatttttatatccatttaacatcatattatgttgtatctatacaatggatacaatggatatccacaaggtatccactatatagatataacataatatgattttaaaatttatttaattggtaacttccatcatgtatttcttataaaagtgctgtgataaacattgttgaacacttgtctgatcaattcggtaggttaaattcttagagttcacgagtcaaaaaaattattcttggctgggcgtggtgggtcatgtctgtgattccagggctttggaaggctgaggtttaaatatctgacactgcgggatagtaaaatgaattgtgctacatctgcataatgaattattatgcaactcttatttttaaattatactttaagttatgaggtacatgtgcacaacgtgcaggttacataggtatacatgtgccatgtcggattgctgcacccattgagacgtcatttacattaggtgtttctcccagtgctatccctcccccaacgctccaccctacaacaggccctggtgtgcgatgttccctgccctgtgtccatgtgttctcgttgttcaattcccacctatgagtgagaacacatggtgtttggttttctgtccgtgtgatagtttgctcagaatgatggtttccagcttcatccatgtccctgcataggacatgaactcatccttttttatggctgcatagtattccatggtgtatatgtgccacattttcttaatccagtctatcattgatggacatataggttggttccaagtctttgctattgtgaatagtgccacaataaacatacatgtgcatgtgtcttcatagcagcatgatttatcatcctttcggtatataaccagtaatgggattgctgggtcaaatggtatttctagctctagatccttgaggaattgccacactgtcttccacaatggttgaactattttacactcccaccaacagagtaaaaatgtttcaatttctccatatcctctccagcatctgttgtttcctgcctttttaatgattgccattctaactggtgtgagatggtatctcactgtggttttgatttgcatttctctgatgaccagtgatgatgagcattttttcatgtgtctgttggctgcatacatgtcttcttttgagaagtgtctgttcatatcctttgcccacttgttgatggggttatctgcttttttcttgtaaatttgtgtaagttctttgtagattctggatattagacatttgtcagataaggtaaaaagcatgcattctctctaagtttcaggagcgattttttttttcaggagtaattcttaactccaaccacctacaatgtcacccacaatctataatcagagatttttacactttaattaaaagattcataaaaacagctaacctttaaaaagaaaaaagcaaaataaaaaaaaattttctcccattctgtaggttgcctgttcactctgatggtagtttcttttgctgtgcagaagctctttagtttaattagatcccatttgtctattttggcttttgttgccattgctttcggtgttttagtcatgaagtccttgcctatgcctatgtcctgaatggtattccctgggttttcttctagggtttttatagtttttggtctaacatttaagtctttaatccatcttgaattaatttttgtaaaaggtgtaaggaagggatccagtttcagctttctacatatggctagccagttttcccagcaccattcattaaatacaaaatcctttccccatttcttgtttttgtcaggtttatcaaagatcagatagttgtagatgtgtggtgttatttctgaggcctctggtctgttccattgatctatatctctgttttggtagcagtaccatgctattttggttactgtagccttatagtatagtttgaagtcaggtagcgtgatgcctctagctttgttctttttgcttaggattgtcctgacaatgcaggctcttttttggttccatatgaactttaaagtagttttttccagttctgtgaagaaagtcattggtagcttgatggggatggcattgaatctataaattaccttgggcagtatggtcattttcacaatattgattcttcctatccatgagcatggaatgtttttccatttgtttgtgtcctcctttatttcgttgagcatggtttgtagttctccttgaagaggtccttcacatcccttgtaagttggattcctaggtattttattccctttgtagcaattgtgaatgggagttcactcataatttggctctctgtttgtctgttattggtgtataggaatgcttgtgatttttgcacactgattttgtatactgagacgttgctgaagttgcttatcagctaaaggagattttgggctgagatgatggggttttctaaatatgcaatcatgtcatctgtaaacagggacaatttgacttcctcttttcctaattgaataccatttatttctttctcttgcctgactgccctggccagaatttcaaacactatgttgaataggagtggtgagagaggacaacacagtgttgtgccagttttcaaagggaatgcttccaggtttgtccattcagtatgatattggctgtgggtttgtcataaatagctcttattattttgagatacgtcccatcaatacctagcttattgagagtttttagcatgaagagttgttgaattttgtcaaaggccttttctgcatctattgagataagcatgtggtttttgtcgttggttctgttcatgtgatggattacgttgattgatttgcgtacgttgaaccagccttgcatcccagggatgaagcccacttgatcatggtggataagctttttgatgtgctgctggattcggtttgccagtattttattgaggatttttgcatcgatgttcatcaaggatattggtctaaaattctcttttttggttgtgtctctgccagcctttgatatcagaatgatgctgtcctcataaaatgagttaggcaggattccctctttttctattgattggaatagtttcagaaggaatggtaccagctcctctttgtacctctggtagaatttggctgtgaatccatctggtcctggactttttttggttggtaggctattgattattgcctcaatttcagagcctgttattggtctcttcagagattcaacttcttcctggtttagtcttgggaaggtgtatgtgtccaggaatttatctatttgttctagcttttctagtttatttgcatagaggtgtttatagtattctctgatggtagtttgtatttctgtgggatcggtagtgatatcccctttatcattttttattgcatctatttgaatcttctctcttttcttctttattagtcttgctagcagcctatcaattttgttgatcttttcaaaaaaccagctcttggattcactgatttttgaagggtttttttgtgtctctatctccttcagttctgctctgatcttagttatttcttggcttctgctagcttttgaatttgtttgttcttacttctctagttcttttaattgtgatggtagggtgtcaattttagatctttcctgctttctcttgtaggcatttagtgctataaatttccctctacacactgctttaaatgtgtcccagagattcttgtatgttgtgtctttgttctcattggtttcaaagaacatctttatttctgccttcattttgttatttacctagtagtcattcaggagcaggttgttcagtttccatgtagttgtgcggttttgagtgtgtttcttaatcctgagttctaatttgattgcactgtggtctgagagacagtttgttgtgatttctgttcttttacatttacatatgctttacttccaactatgtggtcaattttggaataagtgcgatttggtgctgagaaggatgtatattctgttgattcggggtggagagttctgtagatgtctattaggtccacttggtgcagagctgagttcaagtcctgaatatccttgttaaccttctgtctcattgatctgtctaacattgacagtggggtgtcaaagtctcccattattattgtgtgagagtctaagtctctttgtaggtctctaaggacttgctttatgaatctgggtgttcctgtattgagtgcatatatatttaggacagttagctcttcttgttgaattgatccctttaccattatgtaatggcctttgtctcttttaatctttgttggtttaaagtccgttttatcagagactagaattgcaacccctgctttttttttgcttccatttgcttggtagatcttcctccatccctttattttgagcctatgtgtgtctccgcacatgagatgggtctcctgaatataggacactgatgggtcttgactctttatccaatttgccagtctgtgtcttttaattggggcattttagcccacttacatttaaggttaatattgttatgtgtgaatgtgatcctcacattatgatgtcagttgcttattttgcccgttagttgatgcagtttcttcctagcatagttggtctttacagtttgtcatgtttttgcagtggctggtaccagttgttcctttctttctttagtgcttccttcaggagctcttgtaaggcaggcctggtggtgacaaaatctatcagcatttgcttgtctgtaaaggattttatttctccttcacttatgaagcttagtttggctggatataaaattctgggttgaaaattcttttctttaagaatgttgaatattggcccccactctcttctggcttgtagagtttctgccgagagatctgctgttagtctgatgggcttccctttgtgggtaacccgacccttctctctggctgcccttaacattttttccttcatttcaactttggtgaatctgacaattatgtgtcttggggttgcttttctcgaggagtatctttgtggtgttctctgtatttcctgaatttgaatgttggcctgccttgctaggttggggaagctctcctggataatatcctgaagaatgttttccaacttggttccattctcctcgtcactttcaggtacaccaatcaaatgtagatttggtcttttcacatagtcccgtatttcttggaggctttgttcgtttctttttatgcttttttctctaaccttctcttcttgctttatttcattaatttgatcttcaatcactgataccctttcttccacttgatcgaattggctattaaatcttgtgcatgcgtcacgtagttctcgtgccatggttttcagctccatcaggtcatttaaggtctcctctacactgtttattctatttagccattggtctaatcttttttcaaggcttttagcttccttgtgatgggttcgaacatcctcctttagcttggagaagtttgttattaccgaccttctgaagcctacttctgtcagcttgtcaaagtcattctccgtccagctttgttccattgctggcgaggagctgtgatcctttggaggagaaaaggcgctctggtttttagaattttcaccttttctgctctggtttctccccatctttgtggttttatctacctttggtctttgatgttggtgacctacagatggggttttggtgaggctgtcctttttgttgatgttgatgctattccctgttgtttgttagtttccttctaacagtcaggtccctaagctgcaggtctgttggtgtttgctggaggtctactccagaccctgtttgcctggatatcaccagcagaggctcagttggaaatgcagaaatcacccgtcttctgcattgatcacgctgggaggtgcagaccagagctgttcctattcggccatcttggaatggacctatgcaactcttaaaaagaataaggtcccgacttttctgtatgcttaaaaatgttcatttaaacaatgttggagagctgggtgtgctggcacacacctgtagtctcatctactcaggagactgaaacaggaggattgcttgagcacaggagtttgaggttgtagtgtgctatgatcacacctgtgaatagcccctgcactccagcctgggcaacaagagatcccatctcttaaaaaaaaaagtggcagggggagcaggtggctaaataacatggcagctatatatgtattgatatggaaaagtttctaataataattgttatgtaaaaatgcaaggtacagagtgtttacagtatattctacatacatatatatctatacataaatgcatgtatatgtatacacatacgcatgttcatggacaaccattaaaagggttcataagaaacaggtaatggtagatgcccttggacagttagatgaagtggctagaaaacaaaatagcatgagaggagagaaatatactttccattttaaataatttttcattctggaattttgtaccacatacatatattacttcttcaataataaacagataaaattgatatctcattttattttacatttttgacaattaaaataaatcgtcaaatataatgacaattatttttgtcaacaatttgcaaattattgacaaaattggtcaataattttatttacgtattggatttacatattggtcattgctgtttcttaccatgtgaattgcctttttttttttttttttttgagacggagtcttgctctgttgccaggctggagtgcagtggcacgatctcggctcactgcaacctatttctcccaggttcaagtgattcccctgcctcagcctcccaagtagctgggactacagacgcatgccaccacgcctggctaatctttcgtattttaggagagactgggtttcaccatgttggccaggatagtctcaatctcctgacctcatgatccgcccacctaggcctcccaaagtgctgggattacaggcgtgagccaccgcacccagcagtgaattgcttttttatgctcctgcctaatatatacctttccaaaatgcctacaattgttttaaaatctacaggcattttaggaaaagtcccatacttcataaagcagagctgcttgttactaagctaccagtggccatgctttcatttcgggaaatgctgttatggctttaaccattgttgcctaagaggtcagtgatttccctgtgcaccagtgcagcaaaggaggtccactgaggcaccaaatagtttcccatttgaaaagccacaaccatgacaaacttggaaagaacttttcatcttggagttctaaaagccaatgacattaaagtgcatttttctagatttcttatgcacaggtgtaagggacaacattaaaatatcatacaaggccaggcacgcctgtaattctagcactttgggaggccgaggcagggggattgcttgatgtcaggagtttgagaccagcctgggcaacatggtgaaaccctgtctctacaaaaaatacaaaaataagccaggtatagtggtacacgcctgtagtcctagctactcaggaggctgaggtaggaggatcactcacttgagtccgggagatcaaggctacagtgagctgagatagtgctactgcactccagcctgggtgacagagtgagacactatttccaaaaaaaaaaaaaagtcatacaaaagtgaaaataagaaataattttcctagtgtcacttataaaggatatgagacttaaatactacagaatttagaaggtgactgcatactgtttgcagtcatttcctccctcatgtcttttttggagatacagcatctaaagctacatgttggatttgtctaaggcctacttcttttttcccttctatttgatagaggcttcaggtatgatctcaattttcaaattcagcagcacaaactcaaatctaatgaaccccgtttaaataggggtacacgttgtgcacatgtaccctaaaacttaaaagtataataataaaataaaacaaaaataaaaataaaaaagaaagaaaagaaaaaaaggtgaaatatgttatatgaattatatctcaattgaaataaaaaatgaattcattcattgtgccaaagtttacctaaatcttatatttaagattaaatataagattaaatatacatatgtttaaatagacatatgttcatctttccaagcagtgggagaccccagcttagcacaccttccttcttttctgccaacctccagccatgtgaaatttctttacccagttaagccttggtttgggcaagtgaaaaagggattaaaaatatccacctcagaagtgtattgtgaagattaaagaaatactgtatgtaaagcttttagtgcagtgcctggaacctagaaagcacctaacaagtggcaaaatcttcatcattattatcatcatcatcatcatcatcatcaagatgagtacaagaaagtagccatttagcaaagtgaaagcagaacagacagaaaacgtatatgaatctattaccacaattaggggtaaaaagggcctttaattatttcctgacaagttgcagacaaaaccaatcaaaaagcaatgagtttccatgctgcatcaagcagcaccgcatcacagagctcctcttcgtgtctctcccagaacatcacaaaaggcacaaccaaccaaagagggatgcgtacttgcaggagaactgaacaattaagggtatgcaactaacagaaatgaattcattgggaaaaagtttggcaattcctaagaacgttaaacacagaattaccatgtgacccagcaatgacactcctaggtatacatatatccaagaacacgtatctgctaataggtatgaggtttcttttgaaggtgataggaatattcttttttttctttcttttttttttttttgacacagtcttgctctgccactcaggctggagtgtggagtgcagcggcgctatcatagctcacttcagccttcaactcctgggctcaagggatcctcccaccttggcctcccaagtagctgggaccataggtgcatgccacaacacctagctaattttttacttattcttcttctttttttcttttttttttcttggtagagatgggtctcgttatgtgcccaggctggtctcaaactcctggactcaagcaatcctcccacctcaagctcccaaagtgctgggattacgggtgtaagccaccataccccgttgtgataggaacagtctgaaatttgataatggtggtgactgcataacacagtaaatatattaaaaaccactgaattgtgtactttaaaaatggtgaaatacaatagcaaagacttggaaccaacccaaatgtccaacaatgatagactggattaagaaaatgtggcacatatacaccatggaatactatgcagccataaaaaatgatgagttcatgtcctttgtagggacatggatgaaactggaaaccatcattctcagcaaactatctcagggacaaaaaaccaaacaccgcatgttctcactcataggtgggaattgaacaatgagaacacatggacacaacaaggggaacatcacacaccggggactgttgtggggtggggggaggggggagggatagcattaggagatatacctaatgctaaatgacgagttaatgggtgcagcacaccaacatggcacatgtatacatatgtaacaaacctgcacgttgtgcacatgtaccctaaaacttaaaagtataataataaaataaaataaaaataaaaataaaaaagaaaagaaaaaaaggtgaaatatgttatatgaattatatctcaattgaaataaaaaaagaattcattcattgtgccaaagtttacttaaatcttatacttaagattaaatataagattaaatataaaaatcttatattaagattaaatcttaaatataagattaggcaaagtaatttagaaaaattattttatgctatccatagaagaaaaaaagcaagtgcaacaacaacagcaccaaaaacaagttagacgcaaagaataacaattaaaaggaaaaaagaaatctgacagcatttgccacttgtaaaaatttctgttatatgaagattatatcaaacaactcaggacaaacatttttgccttatcccttgagcaactttataaggttttttagtttacttcaagggataacacttcattcaagcagggatcatctctatgaaataaattttaatatacaaacctgacagtaattcttcttctctgaaagacacactacagattcccaaaactgaagtttggaaccaaaactaagaatccacgtgacagcaggcccagaggtggaccttccactgcacaccagtgtgcttataaataggaagaagtattattctattttataaatataaaggacatgctagtctattttcccaagggtctctcaaatcgggcctgccattaagcctattaacccagttttttcataccaatgatagtaggcagggaggacggcagcacaactattttctgtttttcctcctacactgacttttttcctgcttaactgcctttccggggatatatcaggcagttagctctttttgctatttggaatcaaaggattctaagcactaatgttaaatataatatattcaagcttctaaaatactcactgactttacattataaatcagtaatttgaactttataaaagtttacaattagtggaaattccgcaaaagaattttatttatttattttttttttgagatggagtctcactctgttgcctaggctggagtacagtggcacgatatcagctcactgcaacctctgtctcccaggttcaagcgagtctcctgcctcagcctcctcaagtagctgagactacaggcacgcgccaccatgcccagctaatttttgtattttttagtagaaacggggtttctccaggttgttcaggctggtcctgaactcctgacctcatgtgatctgcccgcctggactcccaaagtgctgggattacaggtgtgagccactgcacccggcctctgcaaaagaattttaaatatgacctttacccccactggattttcctggaataattatttcagcaaacttccctagacttactgctcagagaaaataaaactctttaatttcataacatttctaactggtcagagaaataacatattaatggtccatcctctgttattcacacatattaagactttcctaggcagtacgattctaataaggcatcaatactttttgtatccccatctgttaactataaaaacttcacttttccaagctcacatttacaagaccctttcgctcatctgggtcagactgtctgcaacagtaggaaggacccagactctcttcctgtgactctgttctaccagttttcacttcattttccccactatttctgctaaataaacatccacggagctaatgtatatccttggatctagctgctgactccttccccattgcctttgtcagttaatttctattttcactcaattccacgctccatgaggctctggagtccttgaaatagtcaatttcctaggatccaggggtgatttgctattttcttcaccacttcccagttccctggggtccttccattgctaatgctagtgacagtataaataagactatgatagtaagattgcttcatataaatgtttttgccactttttcagcttttactgaggtatttgaaggccagagaagacagaatataaattagtgaatccctaacagcagcaataaaattatagttaattcagtcagtgctgtgttggtgaaggtttaacaataggctctctggggagaaaaagccttgatttggagcatttgctgatttccatggtaaatacactccggccatggttgatttgaagctatcattgtcacatcactgaaaatcacatctagtgaggagactgattagagatgtgctgtaccacaccatgatacagtattccaccatacagatacaagagatataaacagccccaagagcatggataactgtaaatatagtaaaataaatagtaagtgatgagtttgagcatttattatatttgttgttcatgtaatttatttgtttacaagcttctatgatttaattttaagttatttttgtctttttaattgactttatgatttagtttttaacaatggttatgtttaataatggctcacaaaattcctgaaaatttagcaatttgcttttgcaagcaagtacgagccagctccagtgcatcattgattataggatataggaaagacctacacataaccttcaggatgttgtggcattatcaggtatggcccagcttgttgcagcaggcctgggtgacttgaagagccgtggaatctggacctggatgagcccagtggagatgcaaaaggatgtaagaggcagagtgagctggaggagctagaagaaatctgacatggcatcggagataaataggaattagtggatcctctaaaaaatgactgggatgacagagacttctagttatacttggtagatttaatatacttagttactttccttgttccctttcaatgcctcctgaaaccatcctaaaaggataaaagaataaaaaagcacaaaactacaggagatccccatgactcatggattctgtgtttgcaaacttgcctactcagtaaaacttatttgtagccccaaatcaatactcatcgtgttttccacaattatttgtgaatgtggtcagagtggtgaaaaatttgagtcgtccaacacacaagttcccagcagaggctgaacaaagcaacactctgcctttgttctggatctcatactgtaaacatcatccttttcatggtctatttagtgtcacgtttttcataccttcgtgctttttgttgataactttgctgtctaaagtggcccccaagcacagtgctgaagggctgtctggtttcctaagtgccttgcaaagaatatacatgttagataagctttgttcaggcatgagtgacagtgctgttggccatgagctcaatgttaatgaatcaacaatctatattaaacagggtgtctttaaaaagaacctatacataacacaaagctatgtgttgatcctgggctcacaagaatctaaccctgtgtttcccctagaagcaacaattcaatatttacgaattcagtgtttgctgcaactttctagaacataattactgtgaataatgagaattaactggtataataacgaggagaacagaagtgatgattagaacaactaaatttcaaaagttacaaggcatatagatgagtggaatcagctcaccagagaaagccagactgaagcaagtattggccaggctcagaaataggagagccagtgaatgcaggtgacgttcataacaggagaatgagttgaaggtgtgtgtaagaagccattagatctctatttcccacccccaacccggcacagtcaagttttctcaacccgggcagaaaactaatttattttctatagtggctgatccccacttgcttctggactcagggttaccactcgtaggataaggttatcatcctgaaattggggaattcaggcgaagtcctcacggagaatggtaaaactgtttttcccttttcctccactcagctctgacaaccctggctactagctttataccaaccagatggcagactgaaggacatccctctggggatactgcctgggccaaaagaaaatatctgtgtgtattaggaaggggagggaagaatctctcagtgaaacagccctcttagatcatcctacggttaatcccactggtcaaaaagtcatcctctacacacacacacacacacacacacacacacacacacacacacacacacacacattctaatcagctttgttatgcctcgcccttaaatatcaggaacaactgaagactaataggtatttgaagagggcatctaatataaaagagacaaaaaaaattaaaaatataaaaaagaactcataggaaacagaaataatgctggaagattagataacttccaaaaacctatcatggacatcagtatatagttaaacaatgacataattttcacagaacaataataagttttaaaaaagaacactcagtccaggtgtgatggctcacacctgtaatcccagcactttgggaggccaaggcgggtggatcacttgaggttaggagtttgagaccagcctcaccatcatggtgaaacaccatctctactaaaaatacaaaaattagctgggtgtggtggcaggtgtctgtaatgccagctacttggaggctaggcaggagaattccttgaacctgggaggcaaaggtgacagtgagctgagattgtgccattgtactccagcctgggtaatagagtgagactccatctcaaaaaaattttttttaaattaaaaaattagaaagcacacccagagaataacattaacaaaaaactcttaaaaattaaaagcagaaactgaaattttaatatacaaattgaaaagtaaaattgagaaaatctcccagaaaatagaacagcaatgctaggagtgaaaaaaaaagaactagaaaatatgaaagaaagggtcaaaaaataagctcactttgcaatatctgacatccaaattacattggatgaattacagaaagaatgacaaagaagaccgaggggaggaaactatcacacatataattaagaaatttcctagaacttaagaatatcagtttccatgagatagggtccacaaaggaccacagaaacaattttttttaaagacatgaaatatcagaacattgggcaaagagagaatcccaaaagctttcagaagagaaaaagagaaacaacaacaggtcttataaaaggattgggaatcacagcacctacttttcatagcaatactgagtgctaggataaacaatcacttcaaaattccaagagaaaacaatttctaatctcaaattctatgcccagtaaaacaatcaatcaaatgaaagggcagaatcaagacatttctcaaaacattagctgtcacatatgcttctcaggaagctactgggagagggacaccaccaaaaggaggatgttcacaagaaagagaaacacagtatattgggcttgggtgcatataaccaattaccaagtaaaagtggcataaacaagaaacaattctatttctctcctatgtgacaagaagtgagactattgatctaatcaaacattatgattaggagaataggtaaaggggaagtgggtgcatatttggagggaggccttaaatccacatattccttggtgtaaaatcaatacacaatatctacaattgaagaaaacttgaagaaacagtaatataagcaaattattataaattatagaagcaaacgtgagaagaatcagctaaaagcgtcatcagtgttacaaagaattggcctagggtaggtggacagacgagtgttgtttttcattagggattttgaatatctagtatctatctgacttcttaagccatgtataacctcgttcaccatgctgggggtggtggaagtggatggagggaagatgggtggggagaggccaaggatctatgtcatgggagttggcaatactctgaagccatggcaataagacatcatcaagtgagtctggcagccgagggcggaacccaggcagaagctcaaagagaatttcccttcctggagggagcagacaagaaccaggcaggccaggtcctcaagggactgagggctggtaggtttccaaggcaggcagccaggcccaggaaataaggcaaagtggggacatgggtttcagaactgagacaccaggccagaacctgtctggatgccaatgcaagcagatgctgggccccagggtgcttggaactcactccttatctccctctggcctgagataaggatcacgctcaggttgaggctggcagatgagggccacaagggaagcaaaactagaaacatgggaggcttgacaaacagtaagtcaacactggatctgagagctataggtcgttgtcatccttcaaaatgtctgttagtccaagactgggtgccataaacagcccctcaaaatctatccccaggactagttagttatgctgtatccacacaatgtaatagtatgcagccaacgaaacaaaccctgaaggttctgggaaagtttttcttttttgaattaggtgtcatcatttcctactttctctttctatgttcttcatgcccgaaacatggtacctggcaatgcagcaacacctgcgtgggtagaatcatcttgtgaccctggggcaatatgcatgtgaacatgcctatattctaagaatggcaaaatgtgaagatgaacaaagaaaaggaaaaggttcactgaagacatcattaagccacccaccccagaattcgtgatgtctcaaataaaataactaaacacatgcctaaccaatgggccttcctaatgtgatggggatggatttaattggaaactaaaacttctagtctttctaatatttcagaaacttaaaattcactcctctataatgcgatgggagtgcaaaatgagttcaaaactctccctcagtactcctgtttggagtaactacctctccacaaacaaaatccacaaaactcatcctcaaaatagcctttgaggactctggagaactcaaggtatatgaatttaatcatgtcttgtcttatcacatcctaattgatatattttttctatccctatgttgcaggtggggactctgagggacacatcttcttcaggtctagccaatttgttaggataataaattacaaaacacatttatcatcctcaaaagtttgctcaaaataattttgaatgtatcatataaaggatatttataccagcttaaaagcccttagcccatttaaatgaattgcttactttgaaaaagctataataagaagttggtcatttccctaatatgcaattaaagcaattaaaaacatttcccaaatgcttatgtggactgctgctgatacaaactgctgttgtttgggagttgactggaaaggtcccactgatttctgtacatggaagaaacatactgttgacttgtaagaaaatcaagttattcaacttaatggatcagtacaggaaacaaaactctgtttgccaagcagaatatttcactgtgtttatgtttctcctgatctaaatgtgctagctttgaatactgcttttaaactaacatgcacaagtggcatttgatatggtctactttattcattaaaacaaagtgaagattattatggagtcactttgaaaggtagtttgggctttcttatttaattaatccattacacttaaccttcccgtattttactccctgcaagtcttgcaaccattattaacactacacaaatatgttttgcattattaaatttaagaatttagtactcagtaaaattctctgcaggaatattgttattaaatgagttcattaaacctaaccacactaattaacagccaagtgatgaggaacattcatacaaaagtgaactatattccatcttcataacctctctgctaattctagcaaatgaacataagcaatctcaggaaaaaaaatccaggaaggttatagaaaccacacatacctcagtggaaaccagctcctccaaaataaatgtccaggcttgtctgaaacttgctcctcatcacatcatctatcagtaattttcaattaagtgtacaatggggtctagctccaccctcccttatgcctgtaatgacatgactggaaacgtagggcattttaattctacaactattaaccagtcccagctggccacagctcagcattttcaggggctcctacatataaaatcttcaacctctagtacaaggatgatctcttaaccacaagaaaaacaaatgaatcccaagtagaagaacgtcaatagattttaatgtataactaatatctacagacccctgccctcacccttattccctgtagtggatgctgggatgcagcaccacacccctctttaccgactgaagcatgtgttctctcagctgccagcagggttggctgcagaaggcttatgactgagtcccttcctgggaactgctttctgtggaaggcagacacttatgccccttccccagagacaccccatatccaatgactatatgatatgaggctacaaaggcctagccctcttgcctcaactcttggctatgctgaaggacaatcttatttccagaacttcctgtaagatcagctgagacatctcctgtaagtctgtcacagttcaacttctccatgtgcctaatcctgcttccttcactccctcacaggtgttgatcccaagtgtaatcctagggaacccgacttaaggcctccccatctgaagaacacaatctcaaggaagaatttaaggggaaacctgtctacacagtttgactttctgtaaagaagtaagttaattccaactaaacacagttggactttttagtttaagggttcaattcctcacagtccaaaagacattaaataaaatttagccatcttaatagaactgtctttgaagcccctaggttcacttattttaaaagaacaagatttacttatccagccgaattgtttcccagtctagctaataacctagacctattaaggtaataatgttgggtcagaatttatatctgtaatcacactatatctaagtatcccattatccattagctctccttcaccgaagaaataggacaaaaactttacatatactctttttgagggggagtgttgtatagtgaattgtgttccccttcccaaattcatatgctgaagctctaacctccaatgtgactctatctgaagacagggtctttaggaggtaattaatgtgaaatgtgggtcgtaaaggtggggtcctaatccaattggactgtagccttatatgaagagacagaaagagagagagagagagagatctttctctctgtgccatgtgagggcacagggagaaggtgggtgtctgcaagccaggaaaagagcacattagccagcatcaactagcatcttaatcttggatctcctagcctccagaaccacgaaaaaattaatttctattatttaaaccacctagtctatggtactttgttgtggcggccagggctgactaagatagggggtgaagggacatgtaatgcaagtaaactaaagcacttattcctcacagatgcctcgcttgttttcctctttagctctgcatcactcctttttctcaacctcttttctccaggtcctttttccccctcattcagtgttagtgcctttgactcaagagtggtacacatattttcaggccctggctagatcagttggtggtgttctgttcagggtttcagaggctgctgggtcatggcctaaagtctatccagagaaattctgagggcacttcatatagtgaggagaatttggaaataaggtggctgagagctaaataagcaaacatataaatacatgaatgaacaaagaaaccaacacagtcaatgacattagcaacatatagaagtaaaacgtcctgtgagataatcctgtgggtgggaaaacactgaaacctaatcaaggtcacgtctttgtacattcaggcctgaaatgcaatcacaacagtcactgtgatctaagcaactgccaggagagctcatgagttcacagatggaagaaaccatggggattagccatagatttcccttctatggatccaagcaaccttctcattagaacttggttgcctgtttctcttccccactcaggagtgacaaagtatgtgtgactctgttaatacatgtgttccattgcacttggtagtcattttttcaacactaacttggaaaaatggtagcctgggaggtacaccaatctttcataagttttgttaacatgaattagctccactgagctaggtcatggctgacagaatgctaaaatctaattttggaccatgaagttcctagtagggcagagcactaggtaaagttcttcctatgtagatagttggcctcccttagttattttaggtaagctggagctgtattaaaggggagccttgaatgctagacttaagatgggcctctattctctctgcaacaaaggtccagccctctgagggtagaaacataagtaaaattttatgttgagaagatgacattggcagtgtatgaaagacaggctggaagctagacagagtaaacaggaaggacaattcctcaggacagttgctcagggtgaggatttgaaatgttctagtgggaatcagaaagcatgtatatgagaggtaaggcaaagaaagaatcaagaggtcttgccaactttgtttgtaggagggcatggaaaagtaagttctggggtctggttgaatgtgaaaaatagagatgacagaagctggtacagaggtcagagtgtgctagttggagggtggtcagcgtgaagagactgcagatggaactgatcatgagggcccgtactctgaagagaagctgggttacaggaataagcttcagagttaatagtgcagggtaaacttatggaaatgagtatgaacactgagaggggcacatggagaatggaaaggagagggaccaagccttgttgaaagctaaaatgtgtacggtaggaagagcaatggtctaaaaagaaaaggagccagtggcaacagagaagtatgagggaaattgagagccctcttaagaggtagctatggtgtcagaagagtaggaagtgagattatctgctgagggagaaaggaaggggaggagcttgaggtagtgaaaggattggaggagttttccagtggattatgggagagagttgagaagagatgaagaaatggctaactgaacagtgctaagggcctaaccagattagttgcatatggtaggtgtattagtttgctagggctgctatgacaaagtaccacaaactgaggggcttagacaaaagaaaagtagtgatttacacttctggatgccagaagtctaagatagaggagttggcagggcctttctctctctgagggcactaggaaaggatctgttccaggcctctctcctgggcaccagtcatatttgattagcatctcaccctactccagtatgatcttaactaattacatctgcaatgactctatttccaagcaaggtcacatcttgaggtacaaggggctaggacatctacatataaatggggtgggtgaagggcttcctggggcattagaaagctagaggcagagatgctgttcagggacacctgagtaccgactctggtttcttcctgctcctgcaacaggccatgaggctatcgccttagaggggtataccttgaggctgtagtttaaaagctaacagtgtggccaggcgcggtggctcacgcctgtaatcccagcagtttgggaggccaagggggggggggggtggatcacgaggtcaagagttcaagaccagcctggccaacatgatgaaaccccgtttctactaaaaatacaaaaattagggcggggtacagtggctcacacctgtaatcccagcactttgggaggccgaggtaggcagatcacgaggtcaagagatcaagatcatcctagtcaacttggtgaaacaacgtctctactaaaaatacaaaaattagctgggcatggtggcacacgcctgtagtcccagctacttgggaggctgaggcaggagaattggttgaacccgggaggcggaggttttggtgagccaagatcgtgccactgcactccagcctggagatagagcgagactccgtctcaaaaaacaaataaacaaacaaacaaaaacaaaaattagttgggcatggtggcacgtgcctgtaatcccagctactcaggaggctaaggcaggagaattgcttaacccagaaccgggaggcagaggttgcagtgagccgagatcacaccactgcactccagcctgggctagagcgagactctgtctcaaaaaaaaaaaaaaaaaaaaaaagaaaagaaaaaaaaacagctaacagtgttggctcggagctggagtgtacctgggctttaaccttggctctgccacgtatttatcatgtgctcagagacaagtgacctaaactgactttactcaatttcgtgtctataaaatgggaataataataggacccctcccatagggttatgagaactaaacacattaatgaatagcatgcctaatgaagttgtattattctcattttatagataaagaaactgagacatatagattaaccaacttgcccaagatcatttagtagcagagtcaaattcggtctatagaaatcaaaagttcatgcttttcactattgttacattgtttccagtattagctgattcgtttgtccattaattggatattagcatttaaataaaaagttgataaggaaaaaataaaaataaaacattttcctttgtaaaattttcttctgggggtgctggggagtaaattagctacaaaatcaattacaaggagaatgattaaatataaagagttaaaaacaggaatataatttccaagtgctcttttccaaatattatcgctgcaaggtttgaacaggagaaagccagtagagataagaaaaatcaaaactgaataaacttgatgttaaatcagcttctatttcttcttgtctttcctcccattttctccagttgccatgctactcctgaggatctaggataatactgaaagaagcacatatggggcacaagatttctagcactttaaagcttaatgctttaaaagtatgttttgaggcttctttaaaagtttatggatcttgcccagagctggagtcggagcccccgaggctgccgccgagagtgcccgcgagcccgtggcccagccgaagctctttcccgccgcctctccgcgcctcgtccccgtccagccccacccaacccccaacccagcctggtcccctgaccctcagtctggcccggtctggcctcccagcagggtcacgcaactgccccggggacgatgaaaggaggataaatggtgcccaaggtggacagcggtgccttcctgctgctcttcctgctcttgctgtcactgagccgttgcggccagtggggaccctctgctgagacaggctctgtgtccagcacctgctccgggtcacgctctgggggagtaggagtcgcacgactgtctcagccttggatttgactttggcctcatccacctaggggccacgggagaaccatgtgggttaccaagttcaaggggagagagaagaagctgatgaaaatagaggctcatctgggactgccttccttctctggctccacccttgacttcttcagagcttgggctttaagccgtgagctccatctcattccctgggccgcaagaagctcactgggcccgcgtctctggaggctgttgggggggcccttcctctgtctccatagtcgacggcttgctggggaaacccaggatctccgactgcctggacatttgcattgctgtcccctcgggttttgtctcaggctgtgcctggggctgtgcctctccctcaggctccagcttggtggcagacttcttgtcagagccaggttcgggggtccacaagggttcagttccccgggaactctccccctccttgttgatggccacagagggagatccccgtgccttgggctgcatccagcagtggctgaggatctcgtcgatgtggagccgccggttgacgtcgggctgcagcatgtggtagatgaggtccttgcactcgcctgtcaggtgcttggagcgtgggaagttgacgcggtgctccttctggatacgcagcatcttcttgatgttggagtcgtcgtagggcatggagccgcagaccatgatgtagaggatcacgcctaggctccagatgtcgtacaccttgggctggtagggaatgccctgcagcacctctggggccgcatacgctggtgacccacagaaggtcttgcttaatgccattcgaccactgtcatcccgcaggcagcgcttggagaagctgaagtcggacagcttgatgttgaagtccttgtcaaggagaaggttgtcacacttgaggtcccggtggacgacgtccaggtcgtggcagtacttgatggccaaggaaagctggtggaacttcttgcgagcttcgtcctcatgcagggctccccgggttttgattaactcgaggaggtcgccctggaccgcgagctccatgacgatgtagaccttgccatgtgatgtctcaaagatctcgtaggtcttaatgatggagcagtggtttaacatggccagaatctcaatttcccggggaaggaatttctccaagaagtctgcgggggccttcttgcggtcgatgatcttgatcgccacattgaacttcaggcgctcagagtaagcagattttacttttgcataggagccctctcctaaatttatccccaggaggtagcctcgtcgcttgaggacagcagcgtcatccatggtgccaggaatgcccagtgcctctgaggctgccctctacagccccgaggcgcatgggccagcagtgtgctcatttacatcctggatagagagtcctttgggctggccaggcctgctgttcctgcctcctagaggccaagactctggagtggaacatttggcactgtctcccagatgacttcagcgagtgaagtcacaaaggaggagtgccctgggggaatgagaccctggcctgaggcacttggacttggaatcctggaaggctggccagtaggctggagcagacaagatgagcagaaagtggcctcgtgtcttgctgggacctgaggtagaaggggactgtgtgggacacatgggcctgcccatgcttccaaacccagagccaggcatacttgtgcagaattgaggccaattcttgcaaaccagggcatctgaggaggatttaataaagggacaattaataaaggtgggagcagagtgtagggaaccctgagggtcacacaattaccccaagatagtagcagacccctggcctgcatagaaaagggtgggaatggtccctggaacccagaaagagtagtgtagacaggaccaccttgagagaggcagtggccttcaggggagaaaaagccagcctcagtgaccctacaggctggcaggggatgggaggaagtcccatccctgacttctttttctccccttcagcccttgatgctgtccacacaggtgaccctcaggagtgcagagcagggccaagaagagtggtgtgtcaagaaggtagacagcttcctggccccggagtcacgcagtttgagatgcctggattctgccgcctccctatacatctcttcccttgtctgagcctttgctggcttcttacagcagctctgtaggaggacagctggcaggagttctgctcttggctgtgagctccctcctggggacctgcccagctcacggccctggctgggctcccagggcatatctggggctgggggctgaaggtggggcctggatgccaccctgagcactggcagctgctctgaggacattacaagcagcaggggaagcactggacagcaaccatcatttcttctggcagtggagcctctgctgtgactggttctgtgtccagcacctgctctgggccacaccgtcaggaagaaggagttgcatgactgtcctagccttggatttgactttggcctcatccacctagagggagtgagaactccttcctcacatgagccaggtggaaccctgggcccttcaggagtgagttagtagagctggatgtcgctcaggctgggttgggtcaccaccagctgtggcccttctcccttttctctgctccttcaccttgttccccaactctgactgcccactgccagtcctttgtgcgtggttggtgctccttcctccagacagcctccttctccttcctgctggggaaaccccaagtgctgtctcttggaaaccaaaaataaaattctaatctccccagccatctgaatggacccctcttctcagccaaggccattccaaaattaatctgaaaaactagttcaggccatgatagaaagtaggggtcaggcaggcctcatcatccctcctcccttcaggtttcaggcacagctgagcagcagtaacatcgacacagagacctgaagactgacaacagactctggcagtaagatacagcaggctctgaaagaaactgaagtattttactatcaaacagatttctttgacatattttgaaatagctctgcaaagctgtctcttatgaggaaaatctacattctgtgaagaatccccttccctttctagctcttttctcctgagataattaactagagtctgataagaaacatttaacagtgtgttttttctgaagcctgatacctggaggcttcatctgcctaagaaccttggtctctacaacctcttaccccagagacagtcccttctattgattccaggtctttagataaactctctgagccaattgccaatcagaaaatctttgaatccacatgacccagaagcccgcctcccactttcaagttgtccctccttttctgactgaaccaatgtataccttacatacactgattgatgtctcgtgcctccctaaaatgtataaaaccaagttgcagccctatccctttgggcacttgttgtcaggatcttctggggctgtcctgggccattagtcacatattggctcagaagaaatctcttcaaaaaaaaaaaaagtttatctatattgctgtctacaatgaaaaatatccaatgttatgtttactctttgtaattaaatgctaaaaaatttattttggtcccaatgctgttttctttattgagttatcctacaaaggcaatagggaaagataagcagaggcaaatgcaagagagagcagggaagacagcttcttgcaaattgggctttctcatttgtgtgtcccctggctgccctcagcacagagctttacacacagtcataaacactggctgagtgatcatcgcaaagaaagggagagaaaaaaaattcattttcctccattgctcctttacccctgttatgttctatgtcttccaaggataaagacaatgaggtatgaggtattcactcaaaatgataattaccttgggattatgtagaaatattgtatctaaaatcctaaactgacaggatcatttatttgcattttacaaaaatctgggcaacagatgatacacatacactcacacatagacatacaaaacacctggagatgaaggagaaatagtgctgcacttgaattatttctattttggctcaaaattccctgagatatatttctaaaatctactcggcagtttctcccaccccctttttgtcttttgattctttagatgctttaaattcaaaaggctccttatctatatcccagatagttgagttatttgaaagccctgaccaaggcattttattatggatttggttgctcttgggtagagtgaataggtaaatatatgctgtacagggaattttggcaggagtggtaaagggctccagctccctgcttcacatctcaggtctgctccttcagtgccatgtgggattctctttggataccatcccataggttgggaaggcatcctaaaatcgatgctgaagttgtcagtatcaccagtctatgggacctagtgaaagagcaagcagaactctgagaatctgggaagaaaagcagttttctaatgcaaaatgcatgagaggagagccaatccttggtcctagggctctgacaactcattttgtgaccttaggcaagtgacctgtgtttctttcccctaactttccttatttttgggttgtggggggagtctttaactagaaattgttaaggtcctatagaatgacacctaactttttttattctatatctaaagacatgttatcaagggttccatctgccgtacggtgagttgtaggagctgaggcaattaagagcatcagacacggggcagataaatctggttttaaatcccaggggccacatcttattagtacagtgtgactctcggaaagtaacttgatctgtaaaatagatgaagttatctaatttacctagttatcttacagaggcaataggaaaagtatataaggaaaaaaggtatgcaaaataggtatgcactttaaagtgattgtgaggattagacatggtgattcctggtatatcacctcttatgacatcataatggtctaaagcagaggcattctactccattgggcccaagttatgtacaaaataatattcagtataatatagatctattataccttagaatatcccagacgggatcctgtaaactattttctagtatctgttaaatacttttcttaacactactaagcactacagggaagctaaaaacactacgacatggcatcaccttctaaaaatttgttatttagttgaagaaaccactagaatatagatatgaatgtcataatatataaaatatgaaacttaagtagattttttaaagtactgattttgcagtaaattgcctaagcttatgggagagaaaaaaaatcagagggctggggttgcccaggaaggtgttagagcttccttgggcaggatcccctggctgggaggtcacccaggatacggtgttgaggcagtgtcttctaagagcacagttcctgaaaccaaaggacaccaggaacataacaatgcagggtcaaagtctgagctaaggaaacaaattttgaaaaccaggttgaaaattccaagagatcagacagaaatgtttccatggtttaatttggaaaaggtataaggagcctgggttgctgaccagttaggcaggccaaagctggagtgtcggggagcaagtctggtggtaaacagcaggctcagagtgaagtgccagtcaagtcctagacctggttgtggaagcatgctgagtacatttcaagtggctcacaaaggacaattggagggtttcacagaggtgatgagacacacgaggccttgaagcaaaggtagatgtacataggtgatacaggaaagggaaatggcatttgaacaaaacacagagaaatgaatgaatatggccaagaacaaacctttattagatgacaaatgccttggaaaagatagagatgaatataacatggtcagtaccctcagaaggtctctcagtgtcctagcctacctcacaacttgaagcactaggaagcaaaatccaatggccagtcgtaagttttctgctagagactcatgtcactgaagatagctgaggaggcaaaatcctagcctgtggtggttaatcttatgttgtgacagttaataactcattcaatctctttgagcctcagtatgtacatttctaaaatagggactataatagtttctagctcatgggattgttgcaaggatccaaaaagataatgatatataatacttagcaaaaggctagcacacagtggctacttagcaagtgttggcttttattactattattaatggtcattttattttatttttacagacagagttttgctctgttgcccacactggagtgcagtggcatgaccatacctcactatagcctcaacctcctggcctcaagacctcactgtagcctcaacctcctggccttaagggatcctcccacctcagcctcccaaagtattgggattacaggcttgagccactgtgcctgatctattagtggtcattttattacatctgagctatcattgctgctttagtgcataccctcatctcttctcacccagttgctatgaaagtgcccttactggtctctctacttccagtctggcatttctcctcattgcagcccagtgctccttattaaagatcaatcaggatattttattcccctgcttgaaattcttgagtaggctctcatggcccttagaaaaaagtagacgttccttcagaatctgaggctctttatcatctggatcctgctactgtctcctggctccctcagacactctacttcagttacaccctccacccacccccaggcagacccacaacaccttgatctcattttgtcatggacacaccactctatagtgtatttcatttaattccaaccaagtgtttccatggcaaacgttgcatcttattggtctttggattctcaatgcacaatgctctataggtactcaatagatatttatttaaagaaaagaaaaaaataagaaagtaaagaagaaacggaaggagaaagagagggagggaaaggaggagagagaagagggaaggaataaggagggaaggaaaaaacaaagggtgagaaagaaaaacaaagctagaaagagtgatgtctatatcctttaagggaacaggtaagaaactaattttcagtagatctgttggcaaacgaagaaagaagaggaggaagaaggaacaggaaaaagagaagaaaaagaaagaaatcggggattatatcagaagtttaacaatgcatataattactatggctgataatgaaagatccacctgactttttatattaccgctggaatcatagtgtgacagggacaaccattaatgtgtatgtgttcatagcattttctcctcctttctaccccctatactcactgtgtatttgcagattaggttaataaggcagataaataaacagaaaagacagacgcagaattagaaaaaaacaagttctgtcaaggtgtggtggctcacgcctgtaatcccaacactttcggaggctgaggcgggcagatcacttaaggtcatgagtttgagaccagactggccaacatggtgaaaccctgtctctactaaaaatacaaaaattagccaggtttggtggcgggtgcctgtaatcccagctactcaggaggtttaggcaggagaatctcttgaacccaggaggcggaggttacagtgagcccagatggtgccactgcaccatctgttgcctgaacgacagaatgagacactgtctcaaaacaaaacaaaacaaaacaaaaaacaagttctctttatagtagagaaaagagaatggtgtaaaactggggttggaaaacattttctataaagagctaggtaataaatattttaggttctaagggccgcatgtggtctctatcacttattattttttgttttgtacagcacttttttattatactcaagttctggggtacatgtgcggaacgtgcagttttgttacataagtatacctgtgccatggtggtttgctgcacccatcaacccgtcacctacattaggtatttctcctaatactatcccctcctctaaccccctaccctggacaggccccagtgtatgatgttcccctccctgtgtccacatgttctcattgttcaactcccacttatgagtgagaacatgcggagcttggttttctgttcttgtgttcatttgctgagaatgacggtttccagcttcatccatgtccctgcaaagcacatgaactcattcttttttaaggctgtgtagcattccatggtgccacattttctttatccagtctatcattggtggacatttggattggttccaagtctctgctatggtgaatagtgctgcaataaacatacatgtgcatgtgtctttatagaatgatttataatcctttgggtatatacccattaatggaattgctgggtcaaatggtatttctagttctagatccttgaggaatccagaactagaaatacactgtcttccccaatgggtgaactaatttacactcccatcagcagtgtaaaagcttttctatttctccacatcctctctagcatctgttgcttcctgactttttaatgatccccattctaactggcatgagatagtaactcattgtggttttgatctgcatttctctagtgaccagtgatgatgagcattttttcatatgtttgttggctgcataaatgtcttcttttgagaagtgtctgttcatacactttgcctaccttttgatggggttgtttttttcttgtaaatttgtttaagttctttgcagattctggatattagccctttgtcagatagatagattgcaaaaactttctcctattctgtaggttgcctgttcactctgatggcagtttcttttgccctgcagaagctctttagtttaattagatcccatttgtcaattttggcttttgttgccattgcttttcgtgttttagacatgaagtctttacccatgcctatgtcctgaatggtattgcctaggttttcttctaggatttttatgtttttaggtcttacatttaggtctttaatccatcttgagttaatttttgcataaggtgtaaggaagggatccagtttcagttttctgcatatggctagccagttttcccagcaccatttatcaaatagggaatcctttccccattgcttgcttgtgtcaggtttgtcaaagatcagatagttgtagatgtgtgatgttatttctgaggcctctgttctgttccattggtctatatagctgttttggtaccagtaccatgctgttttggttactgtagccttgtagtatagtttgaagtcaggtagcgtgatgcctccagctttgttcttttggcttaggattgttttggctatgcaaggtcttttttggttccaaatgaagtttaaagtagttttttccaattctgtgaagaaagtcaatggtagcttgatggggatggcattgaatctataaattactttgggcagtatggccattttcacgatattgattcttcctatccatgagcatagaatgtttttccatttgtttgtgtcctctcatttccttgagtggtggtttgtagttctccttgaagaggtccttcacattgcttgtaagttggattcctaggtattttattctcttagtagcaattgtgaatgggagttcactcatgatttggctctctgtttgtctgttactggtgtatagaaatgctcgcgatttttgtacactgattttctatcccgagacactgctgaagttcttatcagcttaaggagattttggtctgagatgatggggttttttaaacatacaatcatgtcatctgcaaacaaagacaatttgacttcttcttttcctatttgaatacctttttttctttctcttgcttgattgccctggccagaatttccaacactatgtggaacaggagtggtgagagagggcatccttgtcttatgccggttttcaaagggaatgcttccagtttttgcccattcagtataatattggctgtgggtttgtcataaatagctcttattattttgagatacattccattgatacctagtttattgagagcttttagcatgaaggggtgttgaattttatcgaaggccttttctgtatctcttgagataatcatgtggtttttgtcattggttgtgtttatttgatggataacatttattgatttgcatatgttgaaccagccttgcatcccaggtattgagatggagtcttgctttttcacccaggctggagtgcagtggcatgatctcagctcactgcaacctccacctcctggttcaagcaattctcaagcttcagcctcccaagtagctgggattacaggggcccaccaccatgctcggctaatttgtgtgtgtgtgtgtgtgtgtgtgtgtgtgtttagtagagatggggtttcgccaagttggccaggctgttctcgaactcctgacctcacgtgatctatccgctttggcctcccaaagtgctgggattacaggtgtgcatcaccgtgcccggcctgtacagcatttttaaaatatgaaaaacattcttaccttcaggatggtacaaatacaggttacaggtcaattttaactggccggtcatagtttgcccattcctggaaagaaggggaagaaggaaccaaagagtctgagggcctgcaaaaagttttagttgagagatgaaagtaagggataagaagagacagatactgtagtatctatagggtgaaagacagagattgggattactacatctatagttgtaggttctaaatggatcctccttagatgtccttcaagttactggattgagtttctttgaaggaaaaaaagtgttaaatctgcggtctacatgtcctagtcttagttccttctaaactatatatatccacatgtctaatcttgtttcctcatctaaactatatagccttgagaacaattaagggaagggtagatcgccacctacgtggtatttggccttcagatcaatgcttagtctcattactaggtctcaaaggccatctatttccttttcttattgttgctactggttcctggctctgttatttatgctaatagaaaaggcttgtattgttcatcaattattacagctcttttagtttagtggttcatttaatattacagttctctatattgaaggccttgcatcagtttctgggccaatgacctgatgacgataacaacaacaacaatagtaatttaaaagtgggctttaccactgttccatatcatttattcccacaataaccctataaaggaagtattcctctagatgagaaaagtgaggctcaatgcatttaagtaacttatccaagggcagagctagtaaagggcagaactgtatatttaacagacacaatgcagtctcttaaaaacaaaatcccttaatgctcacaaaccagtaacccagatacagcccagacacttcaattctctccatcttggagtatggtcatggtctcattttccatcctcagtttccaagaaggctgaagtacccttatttatctaagttctgaattgggtttagggcaccagatctagggatgtttgggaacatcatatacttaaaatttcagaagtcctagggagagcaatcaggcaagagaaataagtaaaaggaatccagataggaaaagaagaagtcaaactatctctctttgctgacaatataattctatacataaagaatcctaaagactccaccagaaggctcccagaactgataaacaatttcagtaaagtttcaggctacaaaatcaatgtattaataaaaaaatcagtagcatttttatacagtaataacgttcaagctaagagtcaaatcaagaacacaatcccatttataatagccacacgaaaaataaaataggaatacatctaaccaagaagatgaaagatctctacaaggagcactataaaacactgctgaaagaaatcataggtgacacaaagggaaaaatattccatgctcatggattggaaaaatcggtattgttaaaatggccataaagcccaaagcgatctacagattcaatgctattcctatcaaacaccaaactatcaatgttgtttttcacagaattagaaaaaaactattctaatactcatatagaatgaaaaaataccccacatagccaaagcattcctaagcaaaaagaagaaagctagaggcatcacattacctgacttcaaactatgttataaagctacagtaaccaaaacagcatggtactggtacaaaaccagacacaaagaccaatagaacaaaatacagtaccccaaaataaagctgcacatcaacagtcgtctaatttttgacaaagttgacaaaaataatcaagaggaaaggactctattcaataaatggtgctgggatagctagctagccatatgcagaagaattcaactgaacccctacctttcaccatatataaaaattaactcaagatggattacagttttaaatgtaaaacctcaaactataagaatagaatcttagaagaaaacttaggcaacaccattctgaacaatgaccttgggaaataatttacaactaagttctcaatagcaattacaacaaaaaaattgacaagcatgacataattaaactaaagagcttttgtgcagcaaaagaaactctcaacagagtaaagagacaacctacagaatggaaaataaatatctgtaaactatgcctctgatgacagtctaatatccaggatctataaggaactgaaatcaacaagcaaaaaatatataaccttgttaaaaagtgggcaaaagacagaaacagacttttctcaaaagaagacatataagtggctgataaacatgaaaaaactgctcaacatcgctaatcatcagagagatgcaaatcaaaaccacaatgagataccatctcacaccagtcagaatggttattatcaaaaagtcaaaaaatgacagatgctggtgaggctgtagagaaaaggggatgctaatgcactgttagttcagtcactgtggaaagcagtttggagacttcccaaagaactaaaaatagacccagcaatcccattacatgccacatgttctcacctataagtggagctaaacatagtgtactcacggacataaagatggcaacaatagacactggggactactggcagggagggagagggcaagggttgaaaaactaactgttgagtactatgttcactacctgagtaacaatatcaatcataccccaaacctcagtatcacacaatatacccaggtaacaaacctgcacatgtaccccctgaatctaaaataaaagttaaaattattgaaaaaaataagatcatttctagtaactggtccaaccctcccctcatcttcctttcctcatctctaattgaccctttctccctgaggttttgcaggttatctgcacacgtgtgggtttgggaggtagagctggatgaaaaataggcataaatttatctctctgggcacctttgtctaaactgatcttaggaatatcttcaaatcatgacaaataaataaaatgatgatttttaaagtatgtgtattgccagattagaaactctttttcaaatgtaagtcctgcatgagacaaagaaaacacctttctttgggtaggaaggggtgggtggtctcacatttagttgaagcatatggctgcatttggagtataaattttttcaattttaaaatgtttactttttcctttataaaaagaacacatgcttgttatgtacaatttgaaaaatatgctgcaaataatttattgaattttttaaagatataaatttatggatattggaagaatctctccctatacagtgatcccactatgctttttctacagctgaaatcagaactggaagaggtcttagaaatcatctagtccgaccacctcctttgacagatgaggaagaacacatgttccgtatgattacattttgatgttctcttatagttggctcattccctaaggattttttaaaaagatttatctttttttaaaaacttgagatactattaaattggctaaaattcaaataaacacatcctccctacattctctctctccatctctgctctgactctcaaagatgcatatgctgcctcttagactgttcaacatatggggcctctgcattgatgccaaaagtccagcagtgtctggaactgccacagggcggcccaccgagagagagcattttgagacaaaggtccagctgcctcattcttgggcagtcactggaagcaagacagcaaaatagctgtggctttgctgaccttctcaggagacctatgggcttgaatctggcctctatctggggagaggtgtagagggactggaaaaagggaataggagaagggaaaagaaaatgagaactaccttggaaacaacagtattgaaagtggattaaccatcgctataaataaaaaacacataacgcacattaaatctcacaataggatttttctgtcatgtgcctacttttagattccaaaagtttttaagtatgacaagattcagagctctttttcaaaagatggaggatccacaggatgggcaggcaccatgagtggggtcaatcagtctttgcctctccattcttctcctttctggtgcataacctttgaaggaagaacatatgtggaagagctatgagtctggtttagcatacataaattctgaaaatatcgtgcttccagacacaactggcttcacatcagaaaaacctttccagggtaaacactttgtttaaatattaaacttaagtaaagccagacgcaagaatacagtctaaatagcaaagaaaggccataatgaccttaagtggaaaagaattaataaaagattccccaagctgacaagcctttctggcacagaatgacagctgcagataccaatgatccctgaagtttttcatttttcagatttgatgcactgccttcggttgtgacaaatacacactccagtttttttaaaccttagcctttgccttgatcgtaggaataagtactctgtttttgtaccttaagattttcttctctaatattttttcccggaattacaaaatcatcatcttaaaacaccattactatgaagtccttagatttcaatgctaatggggaagaagaaggtgcctaaaaacaaggagggaaaatcattcaagacatctccaggacagctccacaaatagaggtataacatttgattctgacctttttaatcttgtattttatttattcctctcagtaaagaaggtttgaaatgtggattaaattttaatccattttgtgtactatatattgcatgaatcaggtaaaagttaacattgtttgttggatgctccaatttactattaaccttcagtcagtcatcagtgtctgcccagtctctactggtcatcaggaaaatcctacagagggccagctggcctcattactgggaataaaatagcacaaatggctcacgaactaatcaattatgcaaatatccttgggtcagagaagatccttactggaagccaatttgatattcttcagcaccagggatttaagtgaaagaaaaacaactaattcagaaagctggagaacagaacctatgaggaaagctaaaataaacaaattagcctcggaaagataaggttgaagaatgttctgaaaaaggtcttcctgtatatatgaaaagcagaaaaggtggttggggaaaggaagaaagaaaaagaataaaatgagaccaatatggtgatgcaaggaatttaacactataactgggagctgagaaagggtgcattcattcactcatctgacattaccccaagagtgtactctcagccagacactagctgtgtgctgcctcagcggaggccaggtacccaccttcctgtgatgatttctgtgaggacttatctaaacacaaagggattgagagtcagcttatttaaaattatttacttcttttttgagggaagtagggcaaggtagagtggaacaggaaaagagcagtcatggaggaggctcagaggtaaaactgcccatgtgttatagctgttacatcccaggacagtctacatgtgggtttgggaagtggaggaggacaaaaaataggcatgaatttatctcttcgggcacatttgtctaaactgatcttagaagtttcttcaaatcacaacaaataaatgacgatttttaaagatgtgtattgccagatcagaaactctttttcaaatttatagtcctatgtaggtgaagtacacggctgcatttggagtatgattttttccattttaaaatgtttactttttcctttataaagagaacacatgaaattatatacagtttgcacaattgcacaatgtataatttgcagtgtattttacactgcaaataatttattgaattttaaagataaagataagagtttacggacattggaagggtctctccttatgtccacactcccctaagtctctcagaatgaaattctttcatttgactctctcctggagttagggtggaagttcacagttaaaataagaaactgagttggagagaaataacattaaatgttaccttattagcaccttaccttgaattagtttattaatttaagcctagagaatggacttgaggaacctgagaagcctcagaaagactcaggctgcagaagaatctctgggaggacaaaagtgaactccattagctgctgtggagttagctatgggcctcgccttggtggggacccgggagcttgaggtagttctttggcaaatatagctgcctttgactgatgtgatgcccccccaagcctggcagcatcatgaacagaaatgtgtgcgaaccccaggagataaaacattttggccaggaccatttgcttaacatgacccttacaggacccagcatgcttttgaagctatgtaacagatgttctcacagcatatgctacatgtagaaatgcttgtgaggtatttcagaatttccacttccctctttagagctgattttggatttcttttcataagcattttaaaacatgttccactcaaactgcctcttccatggtacacatgtacctacgtgctgagaaagtgtcactctccagagggaacagttctgttaatgcaccatcagcatcttcagtaaggtctccagaaggcaacttcttgaaatgctattacaaagcatttttacctttctattctggaagaggactcttagccttcattttattataaaaatgtattagcagaagggccttgtaggttgtaattcatcctttctgaagacagcccctaccctccttttttttcacccccattctctctctgacccacatcctttctgcttcttttattctaatgcatctttccttttccacaattgcatttttttttcttttctacactgccctaggctgtaactcagtttggtctctgtaagcagaattcaggaagtaaaataagaacccatagctggtggcataccgccaaccacacctataagatgctttatctcagtacaccctttcactacttcttcacactcctgagatgaagcccactacactagaaagctttcccttgctctgtactacaacaaaaggccctcagataaagcaagggatcttttaggaagagatgaagaaagaataacgatttagcaactagcattttaaattaaatctacagtttatccagaccatttgtttttattattgtactggtcaccatgacaaccctgagaggaaagcatgttttgtatcatctccatttcatggattaagaaaactgaggctgggtgcggtgactcatgcctgtaatcccagcactttgggaggccgaggcgggcggatcacctgagttcgggagttcaagaccagcctgaccaacatggagagacctcgtctctactaaaaatacaaaattagccaggcatggtggcgcatgcctgtaatcccagatactcaggaggctgaggcaggagaatcacttgaacctgggaggtggaggttgcacctttgcactccagcctgggcaacaagagtgaaactctgtctcaaaaaaagaaggaaggaaggagggaaggaaggaaaaactgaggcttggaataatcacatcacttgcccaagccacacaccaagtttttcaactatccactgctgtgtaacaaaccaatctaaaatttggtggcttaaaaaatcagtgtgtttaactactcatgattctgtgggttggctgggttagctgagcagtccttttgctctacatcatgtccaactgggagcctgcctaaggctggaatgatcaagatggcttcacccccatgtttggctgtaggcactggctgttggccagggcacttccgttctcctccacatgtcccgtcaatcctccaagagctctttcctcatgatttgtccagcaggatagcctagacttaatatgactggggcttccaagagggtgcaaatggaaactgccaggacactgaagcctcaggcctggaagtcacacaccatcacttccactgccttctattggtcaaggtagggtcaaccagattccagggggaggaaatagatctactttctagacaaggaagccacatgcatatataggaatgggaagaattgtgggcagctatatgctgtggtctcagtgtttgtgtcccccccaaattcatatgttaaaacttaatcaccaatgtgatggtattagaaggtgaggcctttgggaggtgatgaggtcatgagggtagagctctcacaaatgggattagtgcccttataaaggaggccccagagagctgccttgcccttctaccatatgaagagagtgaaagacagcaagccatctatgaaccaggaagcaggcccttaccagagactgaatctgtccacatcttgatcatgggcttcttggcaaccagaactgtgacacatttctgtcttttataagctacctgatttatggtattttgttacagcagcctaaacagactaagacactatatttgcagacaatctattaatgccacaccagaagggcatagttggaactcagaaagatcagtgataagccactattccagtaattctttaatgttcaagtctaagattatgatttcattgcaggtgcatgcacaggtgcaggatgttagttccccatttggtctcaggtgatgttggcaccactgccagtttgcctttatgtgtcctttatttgaaaggaagagattaacttaggcttgtatataattattgttaatttggcttaataatcagccttaataattagcctaaagcaaatgttctcaataagaactttaagagcagggtatgaggtgacaaagtatcaacaactggctgaataatgggtacttgctgattaatgttaatggcaaagaaccacttgtcagcagaaatcatgggaaggaggttgtttatgtgactgtctcagcagtcttattgagttttccagcgtgaacgcatgttcggtggtcacccaattaaaccctgtctttagacagatgcattgttacatctgagattcttttaggtctgaaactcctccaatgcctaactcatctaacacgtccacttctctgggccccagcttgtacacacacacaacacgtacacacacacacgggcacacatacagagagtcctaccaccaagaaatgttgtagaacagcttttttaaacaagtgaaaattaagttcaaaactttgttttccagattctcacaaatctcttgaagtgaccagagccctcctggagtgtcacagcctaggctgctgtcactggggcttcacagtcaccatgacacccatggcttcaactcctcctccacctccctcagcaaaggcaggcgccgtgattccctttctgattttgaaccaccatgaaaggtatttcactgctctgtgaaggcatgcctgctttctaagagactttacagctgactcccagctgtttatgtgtctccccattaagctgaatgggaagaagaaagtcacagaggaaaagatctctggggtaagggtgcagggactaggttcagggagaggacactctaaatcctgtttggtatttagtcactgaggcttaagtttagtttggttgtttaaaaaatgtactcatagtaacttaaaaattaaagtaatagccaggtgtggtggctcacgcctgtaatccctgcactttgggaggctgaggcgtgtggatcacctgaggttgggagttcgagaccaccctgaccaacatggagaaaccccatctctactaaaaatacaaaattagccgggtgtgatggcacatgattgtaatcccagctgttcggcaggctgaggcaggagaattgcttgaacccaggaggcggagtttgcggtggacggaatatcgcgctattgcactccagcctgggcaacaagagcgaaactctgtctcaaaaaaaaaaattaaagtaataaatgtacatttaaaaatatttgaaaaaatcctaagatcatagctcgatgcagccttgatctcctgggcttaagtgatcctcccgtctcagcctccttagtagctgggaccacaggcatttgccaccacatctggctaatttttatattttttgtagagacagggtcttactttgttgcccaggctcgtctacaactcttgggctcaagtgatcctcccgccttggcctcccaaaatgctggaattacaggcttgagccatggtgcctggcctgtgtttttgttttcatataatttagtaagtttgtagcagaattgagagcccaaggcagatggatgattgccttgaaaaggtgtcacttttctagttaaatgtcagtcataataaaaccctaagggaggctaattgggccattaatttttaatatcttaacaatgttaacagacttcaaagggagaatctacaacaaagattctaagaagagtgtataaattcaaaagatgttcccacattatcagcattaactgaaagtacttaatatttgctctataaggacagacttaaagaagtccatcaactataaaatttattagtagaaaaatcatattatatatggaggggaaaatcaatgaatacacatatacatcttgggagttttaaaaatattttgcctattttgttaaacctaatatagtactagaaaatgttcatctgggagaggaaatactacatgcatgcacacacagtcataaactgaataatattaaataaatagtaacagcctgaaatgaataattgcagctgaggagtcatgcacatgcacactcagagatgtcactttcattcttcactatctgaccccaggctccagggtaaaatccaagctctcccccaggacacaccaagcattttatgtgcactccctttccacctgtttgcttatcctcccaccgcaccaaagatccagtccaacctgacttcttgcagttttcaaaagtactgagatcccatttggctcagctgatgccccattcctggtcatcctcaacttggcagacccttcttcatgcccatcactcggctcagctgatgccccattcctggccggctccaggtcccttcttggccagccaaggctgaaaggccacctgcctgctagcccatattttctcatcttcatgtctgtcccttactagagtagggctccctgaagacaagagtggcatcttttatgctgcactcccccccaccatcaccaccaccaccccacctgcacttggcacacggcaggaattcaataaatatttattcagtgaataaggtcacgtctcaggggtctgtaacaactaacagcttatctgataggcatttgcaagagatggacgccatgtcaactcctcacagcagccctctgagatgggacatacaagtctaaagcccttttccaaatctcttggggatatatatgtttaggatttcagaaatttgtgtattttagaaaggcaatatgttgtattaaacagtatacaatagccccagaggaatttggggccataccaataatcaaacatgtataatgaaccaaacataatcagccccaaatatgagcaatcatactaaatggaataaagactataaatagactctggtcagttcaagttttattacctactgagtttgcagaaaacttgtgaaaaagccgtccattttacagctttctgtattcagaattgcagataaagaagaacggacctgcacaattatccctatatattttggaaataaagagaggtgccacagaaagggtaaataaactgaccaagatcatacagctaataaactagaatttaatgccttactccagaactctactcttttaaaaaggttaaattatgtaatatttgatatacacaatatatgtgacacatatgtaggttaatgcatagcaattaaaataataaaataaaaccgtacctgccaccttacttagagatatgagcccctgatcttaactcccaggcacaccacctcaggacaggctaagcctaacctatttatggctatgttacataggctgaattttaatggcttaggaatgccaccttcttaggtgggacccaggagatcacacagctatgacaccagtcagactctaccaggggaaattaaatccttttatatgggtcgagtatcttttatctaaaatgcttgagatcagaagtgtttcagactttgaactttttcagatttttgaacattttacattacatataccagttgagcattccaaatctgaaaatccaaaatccaaaatgctctgatgagcactaccctttttttttgagacagagcctcgctctgttgcccaggctggagtgcagtggtgtgatcttggctcactgcaagctctgcctcccaggttcacgccattctcctgcctcagcctctccaatagctgggactacagtcacccgccaccatgcccagctaatttttttttttttttttttttttttttttagtagagacgaggcttcaccatgttagccaggatggtctcgatctcctgacctcgtgatccacctgcctcggcctcccaaaatgctggtattacaggcgtgagccactgcgcccggccaatgagcactacttttttttttttaattatacttttaagttctagggtacatgtgcacaacgtgcactacttttgagtgtcatgtcagtgctcaaaaagttttagattttggaggatttcagattttcagatttggggtgcctaacctctatctcaaggcatctatgaagcagggaggggatgaaatcataatgagaggtgacagcgtgctggcagtcctcacagccctggctcgctctcaccgcctcctctgcctgggctcccactttggtggcacttgaggagcccttcagcccaccgctgcactgtgggagcccctttctgggctggccaaggccagagcccactccctcagcttgcagggaggtgtggagggagaggcgggagcgggaaccggggctgcctgcagcgcttgcgggccagctggagttccaggtgggcctgggcttggcgggccccacactcggagcagctggctgggcctgcaggccccaggcaatgagggacttagcacccgggccagcggctgcggagggtgtactgggtcccccagcagtgccagcccaccgttgctgctctggatttctcgccgggccttagctgccttcccgcggagcaggcctcgggactgcagcctgccatgcctgagcctacccccgcctccgtgggctcctgtgcagcccgagcctccctgatgagcacagccccctgctccacggcacccagtcccatcgatcacccaagcgctgaggagtgcgagcgcatggcgtgggactggcaggcagctccacctgcagcccaggtgcaggatccactgggtgaagccagctgggctcttgagtctggtggggccttggagaacctttatgtctagctcagggattgtaaatacaccaatcggcactctgtatctagctcaaggtttgtaaacacaccaatcagcaccctgtgtctagctcaggggttgtgagtgcaccaatggacactgtatctagctactctggtggggccttggagaacctttatgtctagctcagggattgtaaatacaccaatcggcactctgtatctagctcaaggtttgtaaacacaccaatcagcaccctgtgtctagctcagggtttgtgaatgcaccaatcgacactctgtatctagctactctggtggggccttgaagaacctttgtgtccacactctgtatctagctaatctagtggggacttggagaacctttgtgtctagctcagggattgtaaacgcaccaatcagcaccctgtcaaaacagaccactcggctctaccaatcagcgggatgtgggtggggccagataagagaataaaagcaggctgcccgagctagcagtggcaacccactacggtccccttccacactgtggaagctttgttcttttgctctttgcaataaatcttgctactgctcactctttgggtccacactgcctttatgagctgtaacactcactgcgaaggtctgcagcttcactcctgaagccagcgagaccatgagcccaccgggaggaaggaacaaactccagacgtgccgccttaagagctgtaacactcatggcgaaggtctgcagcttcactcctgagccagcgggaccacgaacccaccagaaggaagaaactccgaacacatccgaacatcagaaggaacaaactccagacgcgccaccttaagagctgtaacactcaccgcgagggtccatggcttcattcttgaagtcagtgagaccaagaacccaccaattccagacacaataatgcttcccagatgtaaaaatgatgcaaatgtgatataaattaacaagggctcttttaaaagcacaatggataaaaatgtaatagtgtgtaagaccaaaacatactgatgtgtgctgcttgtataggctagcataacaagagcactgggctactgacctgagctgctgagacaattaggagttgggaagaaagtgtgaggggttacacacagaaagagtgcttaaggccctgtatatggcatggttatctgcagataaggacaaaacccaaagtggtctgccttgtttaataagatctcccttttaggggcctccaattgaccagaggaatcttcaactcacctagagcaaaggttcagaagatgaaagggctttcacctcagcaaagtggaactgatattgtgggagagttattgagtaatagaccctcatcctcacatcaaacatccctaaccttgccagacaccagcctctcccagacagctcactgaagaagaggtccaaccaagaccatggctggaacctggatgctctgaacaggtgatggcaacaatgaggtctctggggaggagtaaggatatgtgtgtgtgtgtgtgtgtgtgtgtgtgtgtgtgtgtgtgtgtgtgaagtgggtgggggggggagagagagaatatgaatgaagactctggaaaaatataccttttgaaaaagccacaggccaggtgcggtggctcacacctgtaatcccagcactttgggagggaggccgaggcgggtggatcacgaggtcaggagatcgagaccatcttggctaacatgatgaaatgctgtctctcctaaaaatacaaaaaaattggccgggcgtggttgtgggtgcctgtagtcccagctactcgagaggctgagacaggacaatggcatgaacccaggaggtagagcttgcagtgagccgagatcccaccactgcactccagcttgggcaacagagtgagactccatctcaaaaaaaagaaaaagccagaattctgtgttcacagaatcttattttgcctctgaacactgttattccctgactggtggtggagtggcaatcctgatggaaggacctacaggaccagaaggagccatattcatgtgccacctcagaaacctctgtcgctgctcgcccattctacctttagctctccaatgtgatcactgacttaaaagtcaaagggcagacaaatgcttcaaataaaactagataacagatatcccttgcaaaaaggagtcctagaatcgctatggaaaacacacacacacacacacacacacacacacacaggcatgcatacatatgtgcacaccttagttgtattctgtggatatttagatagatatttaatagatacttaaagaaaggacaagtaaacatcctagggcaaggaatcaagctggaaacttgcttcatccacatgacattcagtgaaagctgagaaaaagggaaaataaactgaagcaacatgaagtaaagaggttgcctaagaagagtcccttgtatgaaaacagatgtttatacctaaacatataaagtgttaatacctaaactataaaaaacccaaaacctcccaagtgtttgcagctgaagtcatttccagcttttcatgactgtcatgggtagctttggggaatatcatacatgaagggaatcctctttccatgggaaattttgacaatttgtggacacaagaaaaagggtgaagcctgaggcatgtgacacatcatctgaggcaccttttcggtggggatttctctcaggaagaggtccagcagctctctgtttggatgtgactttgctcttttattcaactaatatttggattaatacatcttcttctgtgagttttcacatcagtattccctcctctttaccttgtcttttcccccaaacacacaccacacacattgtgagtcagtagctcacccccagtgggtcagagaactaacttccagcaatcatttctccccattacaagctgtggggaactgtgtgggcctgcagattgctcagggctcccctaacagccccacgctgtacgctgtgtgccttgtgctcacagagcatcaaaagatgctcacagagttcaaaagagagcatcatattgaagacctggctccttataaatgcagtctgtcatgtttgagcagagattctgagacagttgtagcttgttgccttatatttggctgctgctaaagtgtggcccatggacctgcagcatctgcaacacctgaccgtttgtcagaaacgtagaacctcaagcccacaacagaactgcagaatctaaatttgcaatttaacaatgtccccaaatgattttagctgcacatcaaaatttgagaagtactggtttatggcactttatcgcatttattttatttaagaaatagttgcattaattactataagccaagcactcttaaaaacacatttttcgactcaggaggctgaagcaggaagatggcttgaggccaggagtttgagaccagcctgggcaaaatagtgagatcccatctctaaaacagtttttaaaaaatcagtcaggcatggtggtgcacacctgcagtctcagctacgcaagaggctgacacaggaggactgcttgagctcaagagttcaaggctgcaatgagccatgatcatgtcactgtactcaagcctaggcaacagaccaagaccctgacttaaaaaaacaaacaataaaaaccacgtttttcaaataactcatttactcctaagaacagccccctttataattgtatggtcaatagatactattaagcttccattttacagatgaggaaaccaaggcatgaaagtgtgaagtttttgcccaaagttacatggccagtatggagtggagaggagattagaactccagaatccattgtatatgccacaactctatgctgcctaccccttggacacatacaagaaataattagaaggtccaggtatggtggctcatgcctgtaatcccagggctttggggaggccgagttgggaggactgcttgagcccaggagtctgagactacagtgagttatgatcatgccactgcactccagcctgagtgacagagtgggaccatgtttcttaaaaaaactgttttaattttttaaaaaagaaataattagaatggattttaaggatgaacaacttgcaccagtaaaaaaaaaaaaaaaaaaaaaaaattctgacaggtgtttacaacaataattgtggaagctacagattatagtagagatgttctactccaaagggactattcactgagggaggcatgtaagaagtgaaaggttttcccatcccatgccatcgagcacccaggaaaagcaggagtgacaatttgctaaatagaggacacactaggttaaaaattattacatatgaatatgtctttaggacactgtgaatgtaagtctgactggtaaagtaaaagggtttaacctgcatgcctgagaaccttagcctgttaatgcccacaaaaaaaattagaaactgaggagaaaagaaagattttaaaaatggtattttcttgctttacttttcaaagtcaggtcaaaatactttaaaactagttgcagaccactggtagagctaggcctctggccttctggaaccatccatgtggggatgtgactctggctaacccagccattcacccactttctacttttgtttctgggccttgcctccttttaaaacacctcatgcacaactctgatctccaatttgtccacagacttggattttccgggctgcttgtttcatagttcccagggcagcattcaacagaaacactgggaaatagcacctcaggctgccatattttcctgaagcctccagaaagtggatttcattccagtcgaaacaacacttttaacacatttagaaatgtcattaacagtattgtatagctatcagcctagaatctgtgaatttactcaatcttgagtccagatggcatgcacaaaggacagagggcagttatatcagattccgacaatgtgagaaaaaccccaacagcaatttgttctccagtaactccagaaaaagcctagaaacccctcaaaaaataactttttatgttcatgaaaatacactgcttctgcaaatttaaagaaatgtactagtaagccaattatgcaaaaaaggcaacattttgggttaattctaagaagcaaaaggacttcattgattctttccacaaatatttactgaatagtaacaatgtgccaggttactgtgctaggcctggggattcaatggtgaataaagagggacacagtctctgctctcatggagctcaaggttgggtgggccaaaaagatattaaccaacaattcccacgaatgaacatatcattacaaatggagataagtaacacaagaaatacttagaagataatattaaaagaaagaagataataataaaagaaagatgagagggccagggaaggctgaaaaagtgtcccctgagctgagtttacagtttgagaacagctggatgtatccagtgcacaggagctagatagggagtgagagcagaacacactggagaaactgaaattcagaaaagaagagagtggttgatgtacagagagcctagaggagagagggcaagatgaggtaggagaggaagcctttttggccctgcatggttaagaattatgactcacttgaagggttgtaagcaggggcaaggtgagcagattagcacttcaaaaagatctctctaggtacagtgtggaggactgcattggagggaggccaaaggagagatgggaaggccagttaggaatatttgaagtgctccaagtgagacaattagggtaatcataagggagatggaaagaagtagacagatttgagagagatttaaaaggtaaaataataggacttggtgatgaaatcaacatgggagttcatggaaaaggagagctcaaggatctttccaagtttgttctggcttcccgtaagtgggtgtacatggtcacattcactgagagagcaagcctggaagattagttttgtgggaagaatcctgaatccattgttggacttgtggagtttaaaatgccttacaaatacctggcaggagatgatttataggcagttgggtcaattagttatgcaagtctgagatgcagaaaagaggaccgagctggacatttactaagggagtcactgtcacatacaaagagaactgaagctgaaacgtaaataagagacgaaacgtaaatacctagagagaatgtctgaggttaaaagagaagtgagcaaaaattgatgccttaaaatattctaacactcaatagctaggtagaggaggataagcctgcaaaggagatagaaaggaatgagccaaagaggtgggagaacagcaagaagactgtggggtcttggcagccaggaaaaggggatgcgtccagaggcaggcaatgggcaacacagtcaatggctgaaaggtgatacaggcaaggggaaaacaccctttttatttactgacaaggtcactagtgaccttagcattgattcaatgaagtgacaatagggcaccatgaagtgacaaatgccagaactcagtgggttgaggagtttatgagaagcaagaaaatggagacagtaaatataggcaatcaaacagaatcaagcaggaaactcaattagactaaaagccaaagtcctcacaataatctgcaaggccataaaatctgccccctcactacttctcttctactactcttcttttctcactccagccacactggcctgcttattctttgaatgcaccagcttccacctcatggcttttgcctttgctgttcctttaatcaggaactttcttccttcacagaaataaatggctgctccctagccctcaggtctttgcccccaaaattattctctcatcaaggtctctcctaactacttcatttaatattaaaattagcctctcacccctgaactcccttcactattcccttccctgcctttatttggtatttcttactctctaacatatcatgctttgtttttgtttatttatctcacctcctgtcccatgtaagtttcttaaggttggctattttgttcactgctatattctcaatgcttagaagagtcactagtacatagtatgcactcaataaatgtatgttgaataaaatatttgaataaattaaataactttaatatatactatcaaatagcaacaagaaaaaaaaaaggctaaaaaagctccactcatggcagcaataaaatgtagggggaaaattagagaaacaaaataaaatgaaaaataaagcataagttgattgtattaggaaaacttcactgactgacataaaaaagacttgaataaatgtagagacatataatccctcttaacaaaaaattggcttgcagagatatcaattctctttacatcaatttagaaacgtatcctatttccaattaaaattcaatggaattttaaagtccttttgggaggaaaaatatgcctgaaaatagccaagatttttttttttgtggggcggagggagacaatgaggaagggaggccacataaaatattaaaccatgttataaagcaacagtattgagctaagaacaggtagatcaagaaaaaaaaaaaagatccataatgagatgcaaatatatgtttttcaaagttgtacacacattaaattatgtattttcaagtcagtagagattcatcacatggaagtaggaaaaatggttaaccatttgggggaaaattatgttttctatcatgtgctaaaaattcatatacacaaaaattcctgaggcattagatatttaactccaaaataaacccataaaatacttataagaaaataatgtcaatatttatctactgagctcagtagagagagttttaacatacgcaaaaggaaaaagtgaagaaaaagattgacagtgatagatttggctgcataaccatataaagcttatattttgcaaaaggtattacaaaatttaaaacaagacgaacattttaggaaaatatttgcaacctgacaaaagattaggatctctaatatacgaagacctcttagaaatcaaaagaaaaatacaaattcctaacagaagaaagtgagcaaaaagaaaattcacaaattagaaatacagatagtcaataaataaatgaaaaagatgtccaaactcactaggattcaaagaattgtaaagttaaataatgttataccatattcagatgttagatgatggagatttagaaaggttataatagttaatgttactgaatagataagaaaatgggcactcttatagactgctgatgttaaactctgaaaagcaattaggaatacattaacccacattttttttttttttagatggagtctcgttccatcgctcaggctggagtgcggtggcgcgatctcggctcactgcaacctctgcctctagggttcaagcgattcccctgcctcagcctcctgggtagatgggactatagggaacagtgtgagccatagctagagtcaatctggctggaagcaaagaaagaggctgagatctaggagggtaggtgaagttgagtagccattcttttttttttttaattttattattattatactttaagttttagggtacatgtgcacaacgtgcaggtttgttacatatgtatacatgtgccatgctggtgtgctgcacccaccaactcgtcatttagcattaggtatatctcctaatgctatccctcccccctccccccaccccacaacacttcccgatgtgtgatgttccccttcctgtgtccatgtgttctcattgttcaattcccacctatgagtgagaacatgtggtgtttggttttttgtccttgccatagtttgctgagaatgatggtttccagtttcatccatgtccctacaaaggacacaaactcatcattttttatggctgcatagtattccatggtgtatatgtgccacattttcttaatccagtctatcattgttggacatttaggttggttccaagtctttgctattgtgaatagtgctgctataaacatacgtgtgcatgtgtctttatagcagcatgatttataatcctttgggtatatacccagtaatggaatggctgggtcaaatggtatttctagttctagatccctgaggaatcgccacactgacttccacaatggttgaacgagtttacagtcccaccaacagtgtaaaagtgttcctatttctccacatcctctccagcacctgttgtttcctgactttttaatgatcgccattctaactggtgtgagatggtatctcactgtggttttgatttgcatttctctgatggccagtgatgatgagcactttttcatgtgttttttggctgcataaatgtcttcttttgagaagtgtctgttcatatcctttgcccactttttgatggggttgtttgtttttttcttgtaaatttgtttgagttcattgtagattctggatattagccctttgtcagatgagtaggttgcaaaaattttctcccattctgtaggttgcctgttcactctgatggtagtttcttttgctgtgcagaagctcttcagtttaattagatcccatttgtcaattttggtttttgttgccattgcttttggtgttttagacatgaagtccttgcccatgcctatgtcctgaatggtattgcctaggttttcttctagggtttttatggttttaggtctaacatgtaagtctttaatccatcctgaattaatttttgtataaggtgtaaggaagggatccagtttcaactttctacatatggctagccagttttcccagcaccatttattaaatagggaatcctttcccattgcttgtttttgtcaggtttatgaaagatcagatagttgtagatatgcagcattatttctgagggctctgttctgttccattggtctatatctctgttttggtaccagtaccacgctgttttggttactgtagccttgtagtatagtttgaagtcaggtagcgtgatgcttccagctttgttcttttggcttaggattgacttggcgacacgggctcttttttgtttccatatgaagtttaaagtagttttttccaattttgtgaagaaagtcattggtagcttgatggggatggcactgaatctataaattaccttgggcagtatggccattttcacgatattgattcttcctacccatgagcatggaatgttcttgcatttctttgtatcctcttttatttcattgagcagtggtttgtagttctccttgaagaggtccttcacatcccttgtaagttggattcctaggtattttattctctttgaagcaattgtgaatgggagttcactcatgatttggctgtttgtctgttattggtgtataggaatgcttgtgattttttgcacattgattttgtatcctgagactttgctgaagttgcttatcagcttgaggagattttgggctgagacaatggggttttctagatatacaatcatgtcatctgcaaacagggacaatctgacttcctcttttcctaattgaatacactttatttccttctcctgcctgactgccctggccagaacttccaacactatgttgaataggagtggtgagagagggcatccctgtcttgtgccagttttcaaagggaatgcttccagtttttgcccattcagtataatattggctgtgggtttgtcatagatagctcttattattttgagatacataccatcaatacctaatttattgagagtttttagcatgaaaggttgttgaactttgtcaaaggccttttctgcatctattgagataagcatgtggtttttgtctttggttctgtttacatgttggattacatttattgatttgcgtatgttgaaccagccttgcatcccagggatgaagcccacttgatcatggtggataagctttttgatgtgctgctggattcggtttgccagtattttattgaggatttttgcatcgatgttcatcaaggatattggtctaaaattctcttttttggttgtgtctctgcccggctttggtatcaagatgatgctggcctcataaaatgagttagggaggattccctctttttctattgattggaatagtttcagaaggaatggtaccagctcctctttgtacctctggtagaattcggctgtgaatccttctggtcctggactttttttggttggtaagctattgattattgcctcaatttcagatcctgttattggtctattcagagattcaacttcttcctggtttagtcttgggagggtgtatgtgtcgaggaatttatccatttcttctagattttctagtttatttgcatagaggtgtttatagtactctctgatggtagtttgtacttctgtgggatcggtggtgatatcccctttaacattttttattgtgtctatttgattcttctctcttttcttctttattagtcttgctagaagtctatcaattttgttgaccttttcaaaaaaccagctcctggattcattaattttttgaagggttttttgtgtctctatttccctcagttctgctctgatcttagttatttcttgccttatgctagcttttgaatgtgtttgctcttgcttttctagttcttttaattgtgatgttagggtgtcgattttagatctttcctgctttctcttgtgggcgtttagtgctagaaatttccctctacacactgctttgaatgtgtcccagagattctggtatgttgtgtctttgttctcgttggtttcaaagaacatctttatttctgccttcattttactatttacccagtagtcattcaggagcaggttgttcagtttccatgtagttgtgcggttttgagtgagtttctcaatcctgagttctagtttgattgcactgtggtctgagagacagtttgttataatttctgttcttttacatttgctgaggagtgctttacttccaactatgtggtcaattttggagtaggtgtggtgtggtgctgaaaagaatgtatattctgttgatttggggtggagagttctgtagatgtctattaggtcacttggtgcagagctgagttcaattcctgggtatccttgttaactttctgtctcgttgatctgtctaatgttgacagtggggtgttaaagtctcccattattattgtgtgggagtctaagcctctttgtaggtcactaaggacttgctttatgaatctgggtgctcctgtattgggtgcatatatatttaggatagttagctcttcttgttgaattgatccctttaccattatgtaatggccttctttgtctcttttgatctttgttgtttaaactctgttttatcagagactaggattgcaacctctgcctttttttgttttccatttgcttggtagatcttcctccatccctttattttgagcctatgtgtgtctctgcacatgagatgggtttcctgaatacagcacactgatgggtcttgactctttatccaatttgccagtctgtgtcttttaattggagcatttagcccatttacatttaaagttaatattgttatgtgtgaatttgatcctgtctttatgatgttagctggttattttgctcgttagttgatgcagtttcttcctagccttgatcgtctttacaatttggcatgtttttgcagtggctggtaccagttgttcctttccatgtttagtgcttccttcaggagctcttttagggcaggcctggtggtgacaaaatctctcagcatttgcttgtctgtaaagtattttatttctccttcacttatgaagcttagtttggctggatatgaaattctgggttgaaaattcttttctttaagaatgttgaatattcgtccccactctcttctggcttgtagagtttctgccgagagatcagctgttagtctgatgggcttccctttgtgggtaacctgacctttccctctggctgcccttaacattttttccttcatttcaactctggtgaatctgagaattatgtgtcttggagttgctcttctcgaggagtatctttgtggcattctctgtatttcctgaatttgaatattggcctgccttgctagattggggaagttctcctggataatatcctgcagtgttttccaacttggttccattctccctgtcactttcaggtataccaatcagatgtagatttggtcttttcacatagtcccatatttcttggagactttgttcgtttctttttattcttttttctctaaacttctcttctcacttcatttcattcatttcgtcttccatcactgataccctttcttccagttgattgcatcggctactaaggcttctgccttcgtcacgtagctctcgtgccttggttttcagctccatcaggtcttttaaggacttctctgcgttggttattctagttatccattcatctaattttttttcaaagcttttaacttctttgccattggttcgaatttcctcctgtaactcagtcatttgatcgtctgaagccttctctcaactcgtcaaagtcattctctgtccagctttgttccgctgctggtgaggagctgtgttcctttggaggaggagaggcactctgatttttagagtttccagtttttctgctctgtttttttcccatctttgtcattttatctacctttggtctttgatgatggtgacgtacagatgggtttttggtgtggatgtcctgtttgttagttttccttctaacagacaggaccctcaactgcaggtctgttggagttttctagaggtccactccagaccctttctgcctgggtatcggcagcggtggctgcagagcagcggatactggtgaaccacagatgctgctgcctgatcgttcctctggaagttttgtctcagaggagtacctggctgtgtgaggtgtcagtccgcctactggggggtgcctcccagttaggctactcgggggtcagggacccacttgaggaggcagtctgccctttctcagatctcaagctgcatgctgggagaaccactactctcttcaaagctgtcagagagggacatttaagtctgcagaggttactgctgtctttttgtttgtctgtgccctgcccccagagaggcaggcaggcctccttgagctgtggtgggctccacccagttcgagcttcccagccgctttgttttcctaatcaaacaactaactcagtaatggcgggcgcccctcccccagccttgctgccgccttgcagtttgatctcagactgctgtggtagcaatgagtgagactccgtgggcgtgggacccttcgagccaggtgagggatataatctcctggtgtgccgttttttaagcccgttggaaaagtgcagtattagggtcggagtgacccgattttccaggtgccgtctgtcacccctttctttgactaggagagggagttccctgatcccttgcatttcccgggtgaggcaatgccttgctctgctttggctcacgcacggtgcgctgcactcactgtcctgcacctactgtctggcactccccagtgagatgaacccggtacctcagttggaaatgcagaaatcacccgtcttctgtgtcgctcacgctgggagctgtagaccggagctgttcctattcggccatcttctgtgtggccattctgagcatggtgcatacttcttgcaacaaacttacccctgaatagaataatattcaccaataaagcctagttgattgtttattctccttttcctgaaccttcctaagcagtttgcatttttatttgtttatgcatgtgtatacttattgcataagacaaaatactccttaaggtcacaagttataatatattcaactttgtattcctctgtgcctacagtgtacattcaatgaatgtttaacaataataattaatattcttaaatttgttctgctctgacagttatcaaattctgtaagtatggaagatttaggaagtaatctgtaaagtaactattgattgtgaatagcaaattattccttttagagaagctataatttatattaacaaataaggagctttaactaatttacaagatcaaaatgcaatattttttgtgatttcctcatccatattatttcacagatgctaattctggaagcatgtaagcatatggttagagacagattaacatggtacaggagttttcctctattttaggaatgagaaaaatcaaaatgctatttgggagtgtgaagcaccgtattttgtcttaaggtagtattaaactattggttcattcattcaatgttgctttagcatctaatcaacgcatgatgtcaggtagtgtgagagatacaaagacattgttgcattcatgatgcttacagtctagcaggcgaaagaagcagaatagaaattaccataatacaagttagtattgggtaagttcctttatttttattatattattacttctaaatgttagtttactgtgactacccagtaactaaccatagagggatagcttatgaaaagtagactacaaaatattaatttaagaatctctttctaacttttatgtaccttggagtagtcaagataaaactggctgggtgcaggggctcacacctgtaatccgagcactttgggaggacaagacaggaggatcacttgagtacaggagtttgagacgagcctgggaaacacagtaagaccccatctctagaaaaaatgtttaaattagctgggcatgggggtggatgcctctagttccagctacttggaagcctgatgcgggagggttacttgagcccaggagtgtgaggctgctgtgggctataatcacactactatgctctatcctggatgacagagcaagaccctttctcaaaacaaaaacaaaaacaaaaacaaaacaaaacaaaacaaaatactgtgtgggcaactgtccatcaacttttcagtaacaactataatacaaaattatgagtagtttttaggtttactccatctcataaccttcacttaggaattgacaaaaaatcctaaccaagaattcaatgcttttgaaaatactattactgcatggaattaaaggaactggataataacaactacaaataaagagaaactatggatttatcagggttagttcataaacaaccagacagctgcccaatagagactaacttaaacagcatgcctttccataagaatatgctaccactaaaatcctgagctggtacctacaatccataaaaatcaaagtatttcaggcctgaaaagctgacagaaaaaatcccagaagaagaaaatgatactgattagaaagtgatgtgagacttatctaaagttacacgaccagttagtagcaggggcactgaattttggtcacactgatcttttagattaggtaaaatgcacctaatatgtattttcaaaatataaactcctcagctaaattggacaaaaagttgataaacttttttctaaaaattatcaagcatttgaagtgtttctattaagagttgggcactgaggttacaaaggcaaaagaaaagaaagcatggtctctgccttgagtatggggagaaaggaaatgaaaactatgagaatatccagtgtgagcagtgctggtgtaggagtatgtgcaaggtactagggcatcaggaaagtgtccagaggggaggagctatatggaaacagcctagaaaaaaatgagagggtgctcaccagacaggtaagggcgagagaaaggcacttactgggagctgcatgtgcacagcaccgatgcttggagcagcctgggacgctgcagtgaaagaggaatgcagcaagagataatgctggagggggagtggagtcaccgtgccagacaggcagggccttaaattaaatgcccctagaaggagtctgaacttatctgtaaggaacaggcaactgttgaaggattttaggaagagctgcctgctcagttctgtgttatagaaaaatgacttcagtgtcagtgccgagagtcctggagggggcaagcctgcagattagaatactaggataataatcctggttagagatgaagtagcttaggaaaccaaaaagggagagagggataagccgcactgatttcatcctttgcctataataaatataaaattgccaacacattttcagaagaggaaacacctccccaacaattttatcagtgactttcatcctgtttattactgtgaagtaaagtcagcttaagactacatcacataagattgaacaaataaagccctctcttgaaagcatcaacctctaatgtagaatattttgttaagcttctcatttctcagaaagaagttctgaaattttataaataaatgcagaattctgatatttaaaggaaatgcagccacatcgttatgaaaatgcttcccttcaccccatctactttctcacttccttcatttatactacaaatttggacctgtggatgttttaaataatagacaacaggtgtactaaacaatgtcacttgccataatattgaatagatgcccaattaacaccaacattaagtataaatgctctttcaagtatctggtatatcactgatgtgaatgttttaaataattaaacacaaagctcatctatctagaattttccaagcaacagtttcacaagtaaatattcaactgagagttacatcagacaaacatttaatgcttattagtcaatctagaaacttgttcaatttactttttcactttattaggtgacagggatccaaatgtttgaaaaagtaataggtccaaagagtccttctacctacccatctttttttctcccatcagttagagtcatcgataatcaatggcataaatttagtaatgactcatttacatatttaaactggcattttgaaatgacaatgagaagctgacagttaactgttctctaaggaaatgccctttctctccatatggcttccactctgagactaagaattaaagagatttttcaatttatggaacaagagagagtctctccagctgagactcccatgtcatttcatttagaatgcaaatctcaacattttaaatgtcattcctactgatgctaagaaggcagttataaaatgaaaaatcaccctcaccatagagctttggtaaattaaaaagtaaaggactttaagactttaagggaaaataagttttctcatgttagctaggccgcatgtatggtgggaaataccctcaagaagctatgttaccttagctcctcaccttaaaatgaaaatactaattcctgttgcaaagattacataaaataatgcatggtctgattgtaaactataaaggtttgtgtaaacatatgccattattactttagacttccactgatatgttgactcaaaataaaaagactgtaaaatgatcctgtgggccagaggaaaaatcaaaagtaccctgaaaaacatagttactaaaaatgcacgtgaacgaattagtttacagattcaacacaatccttataaaactctcagctgtgttttttgaaaagatcgaaaactaatcctaaaattcacatgaatactcaagggaccaaccacagactaaaaaccttggaaaagaagaacaaagttggacaattcgtacttcccgatttcaaaacttagaacacagcaacagtaatcaagacagtatggtactagtataaggataggcacacagagcaatggaaaggacttgagagttcagaaatatattcttacatttatggtctattgatttttgacaagggtgtcaagaaaatgggaaaacagacgagtgctttcaacaaatggctgttgacaactgaatatccacattcaaaagaatgaagctggatcctttcttcacaccatacacaaaaattaactcaagtggatcatagacttaaatataagagctaaaactataaaactcttagaagaaaacatttaaattatttctgacctttggttagacaaagactttttagcgacaatatcaaaacacaagcaataaaaggccacagaatgtacaatatccatagcaggcaagtctagagaggcagcaaactagtggttgcctagggccggagtggttaggggaaatgaggatgactgctaatgggtacagggtttctttttgaggtgatgaaactattctaaaattggttgcaatgattgttacacgactctgaatatataagaccattgaattgtatgctttaaatgggttaattatgtagtacgtcaattatatctcaataaagctagttaaatataacttaaagaaatgtatgtgaaaagccgcattgagtagtggtcatgaccttcatttgttaaacatgagtttgaattcaggtcctactaactgtggaatcttgagcaaataacaataattctgagcctgtttttctcatcttcaaattctataataaaaattcctttctcaaaggaatgagtattaaatgagatcatgcagactaagtgcttacttggcacagcctagtatacagtaagcactcaataatattagctattaaaagaagagatatgtgggcctagactgtaggtagttgctaaaaacaaaacaagacaaaaaccagtaagttggttgaggcatttctgtaaatgttattttttaaattatatataaacttaataacaaacagggtgcttccaaataggcaggctcactttgaaatactcagtacaaagcgaaagaaggtcataatcataggtcacagaggctggatttaccgtttcacctaaaacagctagaaatccaaatacatgaaataatgattttcagacatcatataacagcataagaatacaatccatgagtaaagggcaacaagcaaggtgagcctacatttacaccaacttgctgcctggaggcagtctatatgctgcagaacaggagggaaaatccaaactgcacccagtggtctcaccgagttgaggagagagagaacaaaattcagggaagccaaggcagattaaatttgtggtgcagagggaagaggaaggaatgctttagataaaaggagctccagagatgtgaagagtaggctaatttaaattagccctagtctaaagactcctctagtcatgccaaacaaagaaagcttaaaggcaagcttccaaaagagccaaactcaactgcaagccacaacaaagtataggaaaacaatacagaaaccagtaccgaacaagtttatatatctggcatccaattaaatgtaactaggcttgcaaagaagcagaaaacagttccataaccatgagaaaaatcaatcaataaacccagaaatgacagagatgatggaattggcagataagaattttaaaagttataaatatgctccatgtgttaaaatggaacttctagaggtgaaaaatacagtacgaatacaatatgaaaaatgcaataccactccactttttggtgatgacactaagacagaggcaaggtttggtgccaactcacatagtggcagagcctagagggaacccaactttcctggctctgatccagggctctttccactatgctgcagagaaataacacaatctgacagacactttagttggttactggctgctgtatgcctgggccttaggtggaatgtagaggcagcaagagtagaagtaggagtctgttataatagacatggtgataaacaagtgatggtttggacctcagtggtagaaaggaagatggtaagaaacggttggatattaggtatattttaaagagttggtagggttgccaatgggttggatgtagcatttgaaaagaggaaaatgcaggaagacttcaagtttctgacttgaacctctagcaagggagtagccatttactgtaatggagaaaactaagggaggagcagcctggggagaggagtcaggaattcggttctgtatgtgataagcttgggatgccatcagacatggaagtcaagtatgcagttactgcatatagctgtctgaaattcaagggagacattgaggtcagagatatggaaagagtaaagatggtggacaaatgactaaaatttggaagctctgggctttaagggtctttagataagaggaatctgtgatccaataatgtggcatcatgttcctcaggcaaagcagtctcttgccagtctcacagagagtccttcttatcattatggcttctcacactatttgtcaggattatccactttctttccctgtgtttctgcattatctatctcgcatagctactgtgagcattacataagcgatatgaatatctggtaagcactccatacgtgttagctgtatcttatctgaaacagataatcctgtttctcaaaagtaatatggtttcacttgtatgtgaatgttcataatgcctttacttacaatagcctcaaactagatacaacctaaatgtccatcaattaatgaacggataaacaaattgtggcaccttcatacaatgaaatgttagtaataaaaaggaactactgatatatgtaaaagtatgcatgaatttcacatgcatgacattgctcaaaaaatgtcagatgcaaaaataatacatgttgtatgattccatttatgtgaaatactaaaagacaaatctaatctgcagtgacagaaagcagatcagtggttgcaggggactgggtctggggtagcaattgactaggaaggggcacaggaaacttgtgttatgaaaatcaatcctgattttggtggtggttaaaggggtatataaatttgtcaaaactcattgaaatatacactttaaatgggttccttttattgcatgtcagtaaatcagagaatactgcatatcggttagctcttctcaaaagtaatatggcttcacttgtatgtgaatgttcataacgccaatgtgtcctcttccaaattgtctcccatgttactttacaatcctaagtagggctctactttttatcttgagctacctcaaggggagttctgtagggtgtttttttaatctaattaaaatatgaaataggatcatatttttgacttatcttggtaggctgattgctttatggctggtcttaggattttaatggtttttcttttttcttctttattctcccacttaggttcagattatatatttcttagtgacactatggtttcattgtagctttgaggctttcagtgctattcagtttctttaatgcttggctttggttatgctgccatttcaatctcacaaaggctctctttcaaaaattgtgttccagagttactgtttccaagaagaataaatatattgcaggttttatgcttatgtcatgagaatctactttgctatgagacaaggaatctagaggtcatagtctttctgttccatttacctttggttcaagtgactctttcaaccctttaaaagttagatgacttttctctcttgcctctccaagttcaatttctgctaacactgaataagggagaatagtagattatgtttaagatgtatataaatttgtagttctttagataagcaaactaccatattctccattaaatctgacaaccttttgttgtttatagttgttgctgctgttgcttaaggacgactgagcaaagcgcctgcaagcaattttaggtcatacatttcactgataacttcagttttgactaattctctaataacacagtacatggaacaatgaaggtgtttattctagcattatataaaataccatatttcaaaacttctaagatgcacagtttaacattgtgaaatctgaatgtttcttaaaatttattggccttgtgccaacacagttaccattgcttgttctgtgtgaatcaggttgttattccttctaaaatggactaaataactgcaaacctcgatgcttcctcaagaataaaagtcgtggttattgtctgagaaacttccatcaacgtcttccattaagatcaggagtgtcaacatcaatacttgcagaaagggtgtaggcatcttagaagaaaatactatagaaaatagtttgctgcatccctaaatattttgatgtcacagaggttgatgtgaaacacaacatcagtactctaaatcaaaaggtgatttggaagatttggatgtcattatttttatttattttattttattttcagacagtgtcttgctctgttgcccaggctgagtgcagtgggtattcacaactcactgcagccttgacctcccaggctcaactgatcctccctcctcagcctcctgagtagccagtactacaggtgcaagctgccatgcctgggtaatttttgtaatttttttgtagagacagggtttctccatgttgctcaggctcgtcttgaactcctaggttcaagagatccacctgcctcagcctcccaaagtgcagggattacaggcgtgagccattgcagctggccaagacttggattttaaatatgaagaagttttagaattattttaaacaatttgaatatgaagaagttttagaattattttaaacaatttgattagcctatttccctttttatatatgtacaagagtgcaatatgataaaaatctataactcaacaattttaagggagtcctttcaggaagaattttaaaattctaagtggtaagaattattttgccatagtttaattggtacataaagtaatggtttgtcttagtctttggcaacttagatttaatgaaattctaaaagaaataattagaaacaatctaaatagtcaacaacagaacaataattaaattaattaaataaataatgagattacaacaaatataaatctttttggccaggcgcggtggctcacacctgtaatcccagcactttgagaggctgaggcgggtggatcacaaggtcaggagttcgagaccagcctggccaacatggtgaaaccccgtctctactaaaaatacaaaaaaattagctgggcgtggtggcgcacacctgtagtcccagctactcaggaggctgaggcagaagaatcgcttgaacccgggaggcggagattgcagtgagccgagattgtgccactttactccagcctgggtgacagagtgggactccatctcaaaaaaataaaaaataaaaaataaatctttttttaacagctttgttgagttatataattcatataccataatgttcacccactgttttttactatattcacagagctgtaaaactatcactacaaccaatgttagaacacttttgtcatttcaaaaaaagaaatcctatactctttagctctcattcatctattcttcccattacccacaaacctgagtaatcactaatccactttctatctctatagacatttcacataaatgaaataatataatatgtggccttttgtgactggcttctttcacttagcattaatgttttcaaggttcatccttgttatagcatgtattagtacctcattcctttttatggttgaaaaatattccactacatggatacatcacatcttgtttattcattcatcagatgatgaacatttgggtacatcttttgactattataaacaatgttgttatgaacattcatttatgtttttgggtggacatatattttcagttctcctagctgtatatctaggagtagcattgctggggtcatacgccaattctatgtttatgttttagaggaattgctagactgttttccaaagtagctgcatcatttcacattgctatcggcaatatagaagggttctgatttctttacatccttgtcaacacttattatctgacttgttgattatagtcttcctagtgggtgtaaagtagaattcccatggtagttttgatttgcatttccctagtggctaatgatgttgagcatcttttcgtgtgcatattggctatgtgtatgtcttccttggagaaatgtctattcagatcctttgtccatttttacattgggttatttgtctttttattattaagtattctttataaattctaaatactagtcctttatcagatgtacaatttgtaaatattttctcccattctgcaggttgtctttcactcttttgatagtgttttttgaagcataaacttaaaaaatttgcggaagcctaatttaacaattttttcttttgtagcttgtgcttttggtgtcacatataagaatccattgccaaatcgaagttcacaaagatttagctctattttttcttctaaaagtttaatagttatagttcttacatttaagtttttgatacattttgaggtaatttttgtagatggtgtgaggaaagtgtccaacttcattcttttatatgtgactatccagttgtccccatatcatttctcaaaaagactattttttcccccattttacccttgaccttggcattcttaatcttggtgctttcgttgaaaatcaattgacatgaatatgtaggtttatccctggactttcaattctattccattgacctatttgtgtatcgttatgctagtaccatagtgtcttaattactgttgctttggagcaagttttgaaattagaaagcatgaatcctccaactttgttctttttcaagattgttttgactcttctgggtcctttaagtttcctcatgaattttaagatcagttcatcaatttctgcaaaaaacagcagctggtattctgagaaggactgcattgattctgtaaatcaatttgggaagtattgccatcttaacaaaaagttttcctgtccatgtacatgtgattttttccatttatccaatcatttttaatgtacccatagaggaatggcatgatgcagatatatcactgggaaaatagaaataatatcccttggttatgggattagagatcattttgatcttatttttgtatatttctatatgtttccaaattttcaacaacaagagtatcttttatataacccaaaagaagttatttttaaagaaaaaatatctttaataaaatatacacatatcctcaaagacctaaagacagaaataccattcaacccagcagtctcattactaggtatatactcaaaggaatataaatcgttgtattataaagacacatgcacctgtatgttcactgcagcactgttcacaatagtaaagacatggactcaacctaaatgcccactgatgatagaccagacaaagaaagtgtggtatgtatatgccatgtgatactacacagtcataaaaaaaaaactagatcgcgtcctttgcaaggacatggatgggactggaggccattacccttagcaaactaacacaagaacagaaaaccaaatatcacatggtctcacatataagcgggagctaaatggtgagaacacatggacacatagaggggaacaacacgcactggggcctatcagagggtggaagttggaaggagggggaggatcaggaaaaataactaatgggtactaggcttagcacccataactagtcggcactaggcttagtatccataactatagtgggcactaggcttagtacccataactaatgggtactaggcatgggtgatgaaataatctgtacaacaaacccccacgacacaagtttacctatggaaaaaatctgcacatgtacccttgaatttaaaataaaagttaaaaatatacatatttaaaatattacataaatatggaaaatatctgaaaatgaaaatgtttgaaacattttccaatatacatgaacataccactgtttattcttggtcacattttcatcagaatttgctgattgtgtgctacatggtagatactgtgctaagtactgagtacactgtttttgagaaaacagatatgatttctgccctcaggaagcctacatttagtgacagaatgacaataaacaggcaaagtagcaaacagaaatggaattataagttgtaaagggcactttgaaagaaagcaatcagtactatgatggacaataacggcaggataaagcaaatctattttgatatagtggtcagggaagctctctctaaggcatcaacatttgagctgagacttgggaactcaaaaatgttaagcactggctttcaatatttgtcaaaggtatgttcaacataagcagtttcttatattgaacggtaaaaacaaaaagctttaaaattccaaagggaaaataatttcaacaaatagagtaacctccaccaccttctataatatggtatgcagggtccaaaaaatccagtaccataaaatatgtggtaaagtcattgtaaggttaatgaaatgcactgaaagagcttacggtggtctcactctgctgcccaaatccagcggggtcccagccgcagtttggagctacttgatcatagctttctgttctaccttaactattgatggggatgattctgggtcccttttataggctaaagttccttggcagaagcagcaattccaagaatctagttagctgatgccttttttgtcagcctgataggaagactgggccaagagaatattgaaagcacaaagcaccaccccttacctccctgacatttcccctcacggcccagtttctcttccacttatccttcccccacacttaagatttccagcctactcctgtttagaatgagggttcagcggaggaccagagcaaatatacttgaatgtggattatcatgggatggggggtttattataggtattaaccgctacttgcccacccaatatctatttcctgctcttagtaacagaacccagattttgtttaggaggtaatgtgcctagttgaattatatgcttcctcggactctactgaagtaggcatggttaagtgatgtagtttgaccaataagatgtcaattaagggatttgggaaagctctgctttaatgatacaggcacaacttatttccacttccttttacatcttcttccctagaatttggggatgaagagggagacagggcaatcacctttggactatgagataaccatgaggatgaatgctttatgtgaaaaatggtgttggagaaaggtagaaggtagctggggactgacaccaccgcagagctgctgccccaacctagatagcctacctccagatttctactaggtgacaaagccaacccttacttgactatggttaggttactgtgatgacatatagtcatctgaaattctaacagatacagctgtctaccaggaacataaatttaacgtctttagatgaatccaaagtttttaaggttttaatgttaaaaagtccaactctcatgtctgatagaacaggaatgcacaaccctccaaaccacatcacccactacagagtggtaagtacaggtcattaaatgaaagcagcacagaaaagtggcttcagagagggaatcatttaatgccccttaccttcattagccccattccccaagtcttaccacataaacgtaaattccaggtaaaactgtgcttaccaggtaaacacacttccagacaagttccttgttgccctagattgccatccctaaacttctcctacatggcaattctgccacagcataattttcagggcagctccacccacagttaaagttatgatttagggttcattactacacataccttgaaacttttaagcagacacattaaagtaatgcagctcaaggaatgttaacaactttttccacttttgccccagccagtttctactctaatccaaaacggcttctttatcaccacccactttactcaaattacgcttacagaattcattatcctcccgggtagaatcaccgaaaataatgtgagcatttatatagaaagtgtagttcagataaagcaatatattaataggccaaattagaaaaggatagcacgctgctagttttctgtatgcactcttgcccgtgtgaaattaaacttttttgcatccatgcggggagcggtggctcaggcctgtaatctcagcgcttcctaaggccgaggcgggcggatcacttagggtcaggaattcgagaccagcctggccaaattgtgaagccccttctctactaaaaatacgaaaattagccgggagtggtagtgggcacctgtaatcccagctactcgggaagctgaggcaggagaatctcttgaaccaggaggcggaggttgcagtgagccaagaccacgccactgtactccagcctgggtgatagagcgagattctgtctaaaaaaaaaaaaaattgtatccaaagttggagtttgcctttattattgcaaatgagataataacctttcaagtaggaaaacaacaaaaaggaaaactatataatgaaatttcttttactcccagaaccaaaataacgagacttccagatagaaatttgcatggagtcaatcagaattacatattattttcatttccgaacagaattactccatcaagttttctgatatcttcctaatgtttctcagtaaaactttagcaaagtaataaaaattcacctaagaatgatcaaaattgcgttgagtcccaaataaataattttttttattttaagggaaaaattccgcactttgctttcttttttttttttttaggtaggcagggacaatcaggaagcagccccggattttcagaaacgatctttagcatcaccaagacatagactaaagaaacatgtaatgcacaacttaggctgctccttcatccaaggcaattcaaatttccacggataccaagtcttcaatggccggtgtcaaccattcaatagaagcataccagaaaatgttgcgattgccttcttcaccacaagagtctaagtgacacaaatttgggcagaagtaattatttggccaagccgggaggcaggaagcttaaataccgcctctgtaggaagtgcgggggatccgaagcaaacaccccaaagtttgtttgtgagtggaggcgcggaggcgcccggagccacgccgaagctcacctggtcagcgcacagagccgggtaggagtcgggtctagccctagtttgctcctgagcgcttcgttcctctcaggctactgcgtttaaatcaatactgggtggcaaacgatacccattctttgggctctgaagtttggaattcatgggttctgcggcacaagaaagtttcttcacaggttatttccctgtccgaggctgtcgcttagctcatctcctcccggtgcggccctggggtgtccaccaagccgccgggcagatcgctgccccgtgctgcggcatcttgatgcccaggaccccgaggctgtggggcagcccctcctacctgggacaagcggccagaactccttttcccacagggaagaacactccaagcccccggaagagtgcgcatcctaaggagatgtctcccaacgcctagacaaagacagcgctgggaaaagttggaccaactggcacccccgcaaggcgaacagagcagtcccctcggccttcgtggccgagccggctacgcgctctcggagtcgcggccaacttttcccgcgagcttctgagcaacttgccgcaagttggggcgagggggcagagcaggggtcaagggcgcgcggagggactgatctcgctcctgtcggtttcctcgtacctccccgcgtacctgctgatgtatccgtccccgtcgccgtcgcacgtctggaagaggcgccgcatcctctcctcctcgccggtgctggacgtgtcgctgctgctgctgctgctgccgctgccgccgccgccgccgccgctgctggagctccccgcagccgctgccgccgcggccgccatcatgcgcccgctccctacttgggaggaggagtacgcgcgaccgcagctggaatccgcgcggcgcgcaagctgcctgcagccccgaacttgcctgacaacggagcatgcccagtggccgccggggcgctccgggcgagggattccacctctccgggttttgcccggactgggaagatgggcgctctggaatcgcccgaggaggcacctcagggaagagggaggaggggaaggtggctggaagagtcagggagctaagggtggcaacgggaacacaagaggaggcagaatacactggaagcccccgggaagggtgtcagcattgtgcatccggcaacgacgcgggcccgggacacttggggacgcttcaggcagagggcaggtgtactcccggcagaccttctccgaccgcccggagtcatggcttccttttccagagaagctatataaacactctccttctgcaaactcaaaacggtgcttgtaatcccactctccaggattgttccgggttctgtacccatagccaccaatgagaaccggaatgactggcctttttatgaaattttgacacctgtcaagaaacctggccctcgcagccctcatcttggctcccactctgtactgggaagagtctgcacgctgtgtggcattgtgtacgttgggtcaatttctggaaacggctcactctactggccaggcatcactagaatttcccccaacagctttaataatgccaagagcgaacataatagatggtctcatttgatccacactacagacctggaagatgcctcttttattatcaatcctacgacttaggaagtattaatagataagtacctcatagagttatcttacatataaaaggagagcagacataatgcagttaggacaatgtctgacacctagtaagtgctcaacaactgttagctctcattgttcccaatttacaggtaagaaaactgaggtaccaagacctgctcaaggttccaggtttagtaagtgttagggcagaggcaagcccgggcagcctaactccagagcaggagcctttaaacactgcactattcccccatagccaaagggaaaccacagtgaagcaatttgtggtttcgtgaatgactcattattctgtcctggattttctgccagagaggcgtgtgaagttctctggtggttttaaaatatgtccacagattctttggtgcacccctcatcaagaggtggagtctgttgcttcccctaaacctggattggacttgtgactgccttgacttctgagactaggttagaaaaggcaatgcagattgcacttggctctctcccttgggacacttacctttgaagccttgagctgcctgaaaagaagtttggctaccctgaagctggagaaaccatgcagaaagaccatgtaaagaaaaaaggagatgaccaaagagctacagctgttctagccctggatcttagaatcttcccagactaggtgccagacatgagtgagagatgatgctagctctagatgctgcaactgcattggagaccctgagcaaaactggctaaccaacccccagagctgtgaagataataattaaaaattgttgttttaagccattaagttttgaggtgatttgttatgcagcaatatataactggaacaagtccatatgtcttgggaatgtctgctaggtcagaaggaaggaatctctgctctctttctcctcctctccaccccatctacctattcctactttacttctttattattctctaagttcccagtatttcagggcactaaaatcatagattcatgagttaatgagttaatgggttatcatgggagtgggactagtgactttataagaagagaaggagagacctgagttagcaggctcagcccccttgccatgtgatgccctgca

SEQ ID NO: 358 - DNA, 134239 bp, Homo sapiens
  source 1..134239: mol_type = genomic DNA
gccaggagagcggccgggagaagagggcaggtgctcagagggagtgtggcctagggccgtgtgggctgaggaccagggagggtgttgtgccttagactagtggaaagggcagggcctgcatttcaggacccttctgcctgatgacaggctttccctgaagctggaggggcagggttggggtgggggggcggtgggggatggggagtggtgaaggttccctgaactgacagggaatgagaggagcagacccatttgagggcactttttgcagaccatgtgtagacaggaggtagcaattgtgccgccgtaggcaccctgggcagcccagggaacgcttgtccacagagggagaggctcccatccactctgaggcctttccagagttctcctttcactggtctccaaagagattctgtagaaccaagtgaaactgctgatactcaatacgtttctcatgttaaacaaaaacaaaaacaaagcagccatttcttacagatttattcaatactttctatctggttattatgcctcttattctgtaattattttttattatgaattatttatttccagatctgtctggcctataaggcctgtaggcactataagggggagtactgcgtcaccttcatctttttatccctttggccttgctccgtgcctgaaagctcaccacactggaacgtccaggtgcacatgtgccactggacaccgggatgttgccggatgctcttttggacgctggaatgctggtgcattgttgccggatgctggaatggtgcacgcacgctctgttggacgctggaatgctggtgcattgttgccggatgctggaatggtgcacgcatgccctgttggactctggaatgctggtgcattgttgccaaatgccggaatggtacacggatgctctgttggacgctggaatgctggtgcattgttgccggatgctggaatggtgcacgcatgctctgttggacgctggaatgctggcgcatgtgcacatgttattggcatgagctgtagttcaaacctcagccatatgatgcttgaattcccaaaccattcgtggaaatgtgtacttcttcctgctggaattctctctctctctctctctcttttaactgattggggagtgaggtgggggggggggtcttgctacattgcccaggctcaaacttctgggctcaaatgatcctcctgcttctgcctcagcttctgcctcggcctccggagtagctgggactacaggcctgaaatactgtttctttaaggaagggcatgttacctataataccaaaccacaaaaggatagctgcggttttgggcgaggagagctcagagagtttcttgcatatggccctgtgatggcggccatggccctgcatagacacgagctggaatctgcaggtggcagccaggacgctgcgtgtgtcgagtgcacagtgtggcttggtgccaaccatggcgagggtggagagccccgtgcctgcagcgcgcgcttccctcactgggtcctgcgtccttgggcaggcgatgcccctgcggggaggggctggtccatccccggccagccacggacccacgcatggacccagcgacccacggacctgcttacctgggcgcggcgcgggtggcatgcggccacacggaaggggcgcgctgggctgctgcggcctctgcagcttctacacctgccacggggcggccggaggtaaagggaggcggcggccaggcgcggccccgcggaggcagctgcactcgctcggtccactcgcggcttcgcggctgcccgcaaaccaggagggcgtggagacccggaaccggggggaagggcgggggcacttgtgcggcacccgcggggctcccaggggacctcggcggtgacacgaatttctaggtgaccttggcggtgacacgaatttctaggtgacctgtgtgatacactaggtgacctagtgacacaggtgacacttccaggtgaccgcggcggtgacccgcggggctcccaggtgacctcgttggtgagccccggggctccccgacgaccgcggcggtgacacgcggggctcccaggtgaccccggcggtgcactcacaggactcccaggtgacccgcggtggtgacacaccggggcgggcgcgcgccgcttccgcttccgccgagccgccccccgccccccgcggcgcagcgcgcgcccccctcccggtggcgcggaaccaatcctgggcagggaggcggcggctggaggctgaaagcgctgccgtggccccctccccgcctccgccgcgccccctccgcactcgcacggccccacccgcaggcgccccccgtgcggaggaagcggatctgccaggatcatttttgttgtgtcggaggatgaggttttggctgaggactgaagagatggccttggaagaaatggtgcagagattaaatgcggtttccaagcacacgggtaggaggagctgctggccgtcagtgatctgtgcttaagcttgacatcatgggctgaaatgtggggaaatgcgtctgatttttgtaagccgccctcgtgttcctttctagccgtggtagctgtgacatggggggcactggttggcagctggtgtgttttcagaggctgtcggcgatcgtatgctgcccgggatagtcaaaatgactgcacgttggtgacactggctctctcagggttgctgggtctgcatgcggagccatttgtgtgtctgaagtctgcccatcaacctgcctgtccgcagccctcgcaatggagaatgcattgcgaatggagaatgatctgagccaagggctttcagagcttggggtttcagagccaggggtagggatggtgaagctacctggaagctcgttttgaggatgaaaaaacctggactaatcaggtggttcttttcttcattaaatgcaatttaaacctaagacagatgtttgagacggtatgggtaaagagtggactggacgttcattttcagtattaatcgaaatattacttcaaataagctttgaagagtagttcagatcgattcttttaggtgtaagcagagactgggctgacagcttgcatctggccgtggctttcaggcggtcgcatctgagttctcaggctgtgttatgcagaagggagaggcatccttaactcgttttccttgaaatgaagaggaaataatgatatatcattaaaagtaagttgccaagtgttttgcctgatgttgccatatgttatgtcatatatgccattactagttgtctaactagtacttgcctgggagattaaaatgtcagttgcttggtttgggtgtggttctctttctctgcccaccccgatggattctgagagtgaaccagtgattaaatcagcataagcaccatcgtatgggatggtctaatcaagatgtttttaatgggggcttttatgatcaaagctgctgggtttattgtatgtgggtcgaaagaaaacaaaaccattttcatgccgtctgctccctgattcttagagaatcagctctttttctgaagcttgagtggagcttttccgtgcagggtttgcagggtttgagtatggtgaagggctgcgtggatgccaggttcacagggaggcttccgatcggctgtgggggtggaggagaaagccccccttgctctgcatgcctctgcgtgccgttcggtgtcagagtcacagagtgggaaccgctccagaggctgatgtcattccccaggtttttagggattggggtttcttcatgagctccaagagacatgtgcgcatttttaattggaaaaaggctatctcagaagagcagcagtgacactgtctgctcactgaatgtcgtgcgagccgggcgctcggtgtgggccatcgtctcatctggaacaggcagtgagatgtgcgtcctcccacacatctgcattaccgataattgcatgcttcaccaggactttcaagtccagcttaccagatatcctcggttatgagcaccctgtagcgtttagttaggggaggtgaccctgcatcatactccacttaccacccattaacactggcctcttccttcagcacaaacccattttctgctcacgctgtgtgaggtactgctcagcggaggcaagttattaggttgaaggctgtaaaaccatcatgagggggtttatgatgcagtattgacatgatgctaccacagagtgtacgggtatgtggtgcacattctctggtaggggtgaaggtcaaggtaaacctgatccccacctcgggtttaaattccaagcacttcctcaggagagttccccacctgcagccaaacactcttcagcgggaggtcatggagctgcttctccttctggggtcatgctaggatccgtgccaggtaaaagctgatggcaacaggacactgatgtggcggctggtgtaggtcctcagggcagtggcggggctaggtcacagctgagggattgcgtacagcggctggccttagagcagctgcctcattcagctgtgcagagcttcaccctctgtagattcacccccaacccacaggcattttatctttgctgctgtccaggacatgctgctgtgttttaatttcagatttatgcatttcttctgtcacctagaaccttcattagctaggctaatctgcatgtaaaggaggataatgtgtgctgtccatatggtctgtgaatctgtagcctttgaccttgagaattgacattttatatacttttctgaacctgatcttcagtaacaaggccaggggcactttccagtggcaacttccccctggccccccttctatgtgatagggctcattttcgtctgttttggttttctctttggaattttagtcattggtgaaaaggtagaagacattcgagggagcaatgctatggatctagttgatttaagcattcgatgaaacagaacagtggtcctccaactacagcatgtacatgcgtcaccttgggggcttgttaaagcacaggctgctgggcccaccctcagagtttctgattcaggaagtctggggtagggtctgataattgacatttcttaagttcttgatgaagttcttcaggaatcaaacttggggaactactgtggtagaagaatctttaaatctagccccaccttttccattagttgacctaatactaactcttgtcatagacagatgatgatagatggataatgcatggataaatgagtggatggatggatgaatgggtagatgggtgggtgggtggatggatgggtgggtggatgaatgtaggggtggatgaatggatgtgtgggtgggtggatggatggatggatggatgatgatggatggatggatgtgtaagtgggtggatggatggatggatggatggatggatggataaatgagttagtagatagtggataagtgggtggatggatgggtgggtggatgaatgtaagggtggatgagtgggtgtgtgggtggatggatggatggatgatgatggatggatggatgtgtgagtggatggatggatgtgtgggtggatggatggataaatagataaatggaggatgatgaatgggtagatggatggatgagtggatgcttggacggatgagtggatggatggatggatgaatgagttggtagatagatggatgagtggatatatgtatgtaaggtagatggaggggtaggtggatgggtgtatggatggatggatgactggatgactggatagatgaatgggtgggtggatggatggagggagggagggatggatgcatagatgagtggatgcatggagtggaggagtggatggatggatggaaggtggatggatggatgaatggatggatggatggatgagcaaaagctgtgtgctgcctcctgtccttaagctcttcctgggaagggcctgtggcctgagcaatgggctgagggacacagcagcacggaggggctttgggggatgagggggcttcccaggaccaccacacaggcacagctgttcggcaccccccagttgcaggtctcagaggaaaagctctggggggacgcgcccaggaggcaggggcacgcatttctgtgtggaattgaagagctctcagtggagtaggtgcggctccctggcaaaatgccacctgcttattagccagcccagcggtttctgacggacgccttagcactcccctctcacgcctctgccttcggcctcagtgattggcgtctcctcaaggagccatgatttctttgtccattttttaaatgtgctgaggccctttaggagaaaaaccacgcagccaaatgaggtacgtctgtgtgggttgctgactattttgtaacatgaaatttaggtctctaattagataggtgtgactataaagtacagaaacatttaaaaaacaattagctttcatgggatgttgttatggatcttgttagtagggattccggagcaggttttagagatttgagcggagggaggcttgtgaggaaaccgtgagtcctctgagcatccttggtgtcctgtgttgctgaccttctgtgatctgacgccacggctcagtgcttcccaagagctcctgagaacgcagcgctcaggcctcccagctgggtgagtctgacgccctccatgcgaagacggcgcgagcacggcttcacctgtggaaccaggggcagacttatgagctcccgggggtttcagttccggcctgctctgaggacactggggggccggccctgtgtttgcttggagcgcccttcagggagacccgtggctccaggggctggcgctgagtgaccacaggcaaggtctcaggagtgagtgatgccaggcagcacctgagaaggggatgcctgcgaggtgtgttccgagtttcatggggacttgtgttggccaccgcctcctgagtcactggccccttttcacgctgcacctgtgccttgggatggtggccgccttccagcgtcttcctgatctccgtcttcaaagccgctcctgactcttccactgccccctctgaccccatcccccactgtttcatcagctcccatcctggcgcttcctcacctggtgcctcattgcccggcacttccttatctggcatttcatcacctgccgctccacatcacctgctggcttcctcctcctttagtcttacgtttggagttccctgcatttggcttccctaagggtaagaccaccttctatagtggtgcaaactccccctcagaactaggggcaccagttccgcaaaggcacccgggcatggctaacctctgagtctgcaaagccccttgcgtggctgacttccaggtctgcaagggcccccggcgtggccaacctctgagtctgcaaagcccctggcatggccagcctctgagtccatgaagcccccggcgtggccaacctcattggatgagtttgcttggacttttgcacccctggcatgctgctgttctgctgcttttcataagcctggccccttgggtgtggaaagtgcatggattttaggggttccactcattttgcagacgttctggggaaaatcacatttgttgatcatcaataccagctgaataccagagggtgcactccagaattagaccttcagggactagtaaatatgagagatactggaggatgaactccagaattagaactttagggactagtaaatatgagagaagctggctcgggagacctgctttcgccataataaaaaacaaggcataagcatcacaatcagaagttctccaggcttcagctgctcatgaaaggcatgctatgtctgacaaacacattttcatgagtagagaataattttaacagactctagggtctactgactcataatttaaccaaatacagtttctggagccaagctggttctgcagcctaattatggaaagctcggctgccttttccgtgtgtttcgtttcctccgccgcctacgacgtgcaggcagcactctcaacatagccccttctttcaccagaactatcgtttccacgtcagctcacgtcaccatccgtagagttggaaggataccactgtaagtagtattttcacacttctacccttcggattaactcagaaggtatctggtcacattcattttataactctgggtgtggagaaagaagcatctgttacgccttttggaatgtttacaagctaactgcccttgtctgatacacacacaaaaatggagctgcctacattggaattctagcgaagtactgaagttagaatgtctaatgtctggtggtcatatgtggataagatgtgggatgaggtttgcaccttgtgaggttagcggggcccctatgaagggttgcattgactattaggttaaaatcactggtgctggacccgtgacctgtgaggtcaaaccccagctctgccatctgtggctgtgtggtgcctcggtttccccatctgcagaatggactcaggagagcacctacctgctagggttgatgtgacaatcaaatgagttaaatctgcatgaaaagcactgagaagcacccagcaggcaggaagctgtggggacccgtttgctgttagggtcacttgtgcacatggtcagtgccggcgggtacccgccatgagcacctgtgcacagcagggagccgctgccgtggtcatcctcagggagccgctgccgtggtcatcctcacatacagttaggtgtgtgaccgcactgacgatcccagtaatgaagtatgtggggattttccaggtaaatgagaaggaaaaggaaggttctgagaggaagggtctgtggttgacctcgttgcggtcgcacggtgatagaggtgacatccgtggtcactgttctcccagatgcccacggtcgcagagagctcgagcccgggcttcagcacgcagcacctcacaggcccctctgccatagcaagctcctggcctccctccctccctccttccaccccaggagcctttgtccagtgtaaaccccaggagatgcgcagtgctgggaagaaactgaacctttgggaagagacactcaagaaaacttacagttgcgagtttgaaaatacaacagatccgattgttccttctaaattatgggattgcctggcatttgcctctaaattgggctctcagcgaatgttccgggtttttttttttgtttgcttgtttgtgtgtgtgtatgtgtgtgtgtgtgcgtgtgtgtgtgtgtgtgtttgctttactcctttattaataatgttaaagaaatgagacaaatccccaaagcatgaaaaccaatttctcagcattagtcatattacttaattgtgctacttaattcactaaaggaaagaactagtattaagtttcattaatgacatttttggcaatatattagagatggtgagctaatgccccaaacaagacttcgtttctgtaagaatgccttatcttttaaaacgaaacttgtcatggacaatgaagagaagcattccagctggagcacctgttaaacgctgcacaggggaccacacgcggctctgggctcggccttcaggtcgctcatggggcggcaaggctgtggcggacggcagtgtgtgatgctcacgcggggagcagcactgggtcacctgcacctctgaggcagagctgtgtggccttcccagccattcaccaaaggtgcctccaccagaccggagccacgaccttccctggcgggtcccgggctgggactgaaggagaggaggggctgctcggtgagtggcctctcagacaccatggcgggaagacgacagagccgtgaggagacacacaccaaaccggacacacaggcctcctgggcagcgggaaacctggagacaaggacctggtccagcagggctggcgcagaggggttggggtcgcccagtcggacagtgcggggcttcccagtgctgctgtcactaccctgtgggggctgcatgggggagtcatcggtttccacaagcacgctctgtccttccctgcaccccacgctttactgagagaggaaacgagacaccttcgtctgtgccacaacccaggtgtgcacggcggctcccacccgcatcagcccaggagcgctgaattttaaatcacccaacagctcatttaagaccggccctaaacaactccctactccacgactaatggagtggctaatgtaagactcttttactgccaaaaatgataccacttactgatatggatttcttaacagtagcttggggccacattgtataaaatagactcccggggttcacaaaagtcaacccacttctcaggggcccaaccattctcgagcctccctgaagccaaccagcggggtgacaggaagaacttggatctcacatgggttttttgtgttttctcatggaggggctaccacggagcttagggaggaagtggcccccaccagccaggagaggacggccgcgttttcacgatggtcgctgaagccaaagcttgtatgagctacatataagaagaaatcagcagatcgtgagtgaggttcatatctcaggattaatttttgaaaaatggttttaattagtaacatctttaaaactatttagatgtttaggacattgaatgatgaacgtctgtgcacatccaatctgcgcagctggaagtggccctgctgttccgatttccttgacttcctcagcaccttaccacgcacaagggaaggaaaggcagagagagaggtttggtgttgaccccagaggcgaccctgatggctcccgtgcgcaccgctcactgcttccgtgaatacaaagcctgtctgcgtctgtccttgtggatgaaaccaacatttagggcttgatttcctggttattcaaagaggcccttggaggctcaccttaggtcaggagttggagaccagcctggccaacatggtgaaacctggtctctactaaaaatacaaaaattagccgggtgtggtggcgggggtctgtaatcccagctacttgggaggctgaggcaggagaattgcctgaacccaggaggtggaggttgcagtgagctgggatcatgccactgcattccaatctgggggatagagcaagactctgtctccaaacaaacaaacaaacaaaaccaaagaggcctgagctctggaaacaccacgcgaaatgcgccatctgtttccccattttcatgtgagtcaggttagggctgacctgtcctgggcttgcacacaagcccccaacaaaacggggttcgtggtctctgctcctgggtggctgagacatcgatcccatcaccctgctttcctctgtagctgttttgggggatgcagcacagacagcaagcgtccagctgcttcaggggacggcagccttgggaccaccttgttgcgtctggcaggtgggtgtggaaggcaggagggggatggtatgtggagctctgtctttcctggcagaagctggctctcaacacctgtagctctcagaggagcaaacccagcacagaacactttgaacagaatcactgtatttgtggaggctaataggacaccaaggcgccacctctcaggctgtggaagcagccttttcctcttgatgtccccgatgccagtgggaggacatggtaggcagggaccctccatacgttctgggagcgcctgtgcagggtggcaggacgggtgtgcactcagtaaacaatgttgaataaatgccttcttttgctgcaaaccagatgcgtgttctaatcacatcagctcacagaagggcacatgtggtgctccagacagcatgtgggctttcacaagcaggcctgagcgccagccctgccaccttctcttcctgtggcctggagcacataacaatgagttaaaatggcactaggccatttgcacggccttgcacatcagctgtgaggcctggagccctgtgtgtgcccagcacggtgcccagggactctgagagcctgagggtggcacgtcacctcgggggccattgggagccctggatgctgtcacctctcacccctcggaagcagccatggggcagagggtgggagctgctggcttgggacgggctcaacacctcttggggaaaagcatctccggccacgcaaagcaacctcatcacttcctccctcgaggagctcggcagcagacgggagccacaggcgtggaacttcccactttgtttcaggacagccagcagcacgtccctcccttcctctgggtttgtagttgtttgtttgaacttgagacttcctgaggcctggaaggtgtttttggcttgctccataaggcaaggaggtccagcccacgcaagcccccgccctgttcgaggaaggaaaggcccagaacttgcacacagcaggcaggcccagcggctgggtttctctagcacctcggcattgtctgcctgctcttccaggcgtgcagggcagtggtggctcgggccaggctctgggaggccgggcactctgaggaggtggctcagccctcttgggttctttcttgtgagttggcgaagcccagagtcaccagggtcctgagcacctgtctcttgtgaccatgcggcacccgcccggcttttagctgtcgcagcagagacccgaaggctgtggctctagcatcagggggtcgcctgtggtccctgcgtgaagaaccagagctgcctccgctttgtagcagcctttgtgacagggcggttcgatggccgagaagggagcatcccggggaaccctgcggcggctgtggtcactgcccaggaggcgccggggaactgcagggcgctcgaggccaggtgagatacaatggggtcgcagggcatgggggcaggtgctgtgtcccctctgcaggtgtcctctctgcgggcaggtgcctccctggggtatttctctcaccacttgaccagcaaaaacctgtgcagctcggagacttcttaaaaaggtagagataactgctgagcatcccactccaggtctgtgggtccagttttctttgttcatctctgggtcggccctgtcctgcagttctggaacctgggcttacgaatttccgctccgattggaaagacgagtggactcaaagcgagggaagcggcagtggtgggtttaatgaggctccccgggcacacgcggtctgtgggcaggtgggtgtcctttgcatcacaagaggtgtgttttgggtgggatgagggtgcagagctgtcacaggcgtggcccaggccaggtggaccaagaatgccattcaggaacagcacgtttgctcggcctgatggaacagcctaaactctcacaagtcacagccagtgcttttgttcacttcagaggagcaagggcattctgctggcttgagggggagaaaggagcttgttgctgatttccgctccatcctgccctttcccctgtctggcgacctggaaccacggtgggctgtggaacgtggggcagaagttggctggggccagcccccacccctgctttgacttggctccccacggagtttgggagcatttatttcagagatggatgggcggcggctgggcattggcaggtgggcgtcagggagaggaaagggaggcagcgaacacatccaggcgatgcctgactgtcctggggctgagcggcgccagccaggagggccaccatgcgcaggagagcctctcaggctgccgccttcccctttcccccgccttcccctttcccccgccttgggcacggacagagcctgtaacactgaggagggctgtgtcactcactgccggtcagctgagcgtgcaccgtgtgggtgcaagtaccccagggctaaaataacagatcccagcctccctccgagtccactgacatccaccacagcaccgtgtgagggaggcagccaggggctgtgcgtgaatcccgcacacgccagggtgtccagcgctccattcacgccccaccaccctcccaaagctgaagtcttaagaccctggacatgagcacagtgggggcttggagatggggaccccaacacatccccttcctgtgcactggggaccctgatacgtccccttcctgtgcactggggactctgacacgtccctttcctgtgcactggggaccctgacatgtccccttcctgtgcactggggaccccgacacgtcccttcctgtgcactggggaccccaagacgtcccttcctgtgcactggagaccctgacatgtccccttcctgcgcactggggaccccgacacgtccccttcctgtgcctgagaactcctgagacatcccctcactgtacataaggacccccaagatgtctccacaccatggggtaccaccctgttccttgtgggagcaggagaatgcaggagctacagtgaacttgtccctgtaactctcacagcgacagggcctctctgcggtggcagtgttgggagacgcgatgagagtgtcatccgctgtgagttctgcggtgctctggtcccccgtgaagacatcgtccacgacattcacactcactgagccacgtcctgcccttggctggaatgtgagggcggtgagacacccccatcctgtaaggaagtgtgcaccgagccctggtccccagatgcaccgagcccgtggcatctgggtggagcggcctccgcggcacagatcacctgggtgtagtgagaggcagactctgggtccctgggcctgcgagcctgagaccggatgaccaccagctcctggcagggtccacaccccgaggcacaggcagggggacgcatagcccaggtgtgggacctcctccttcaggccgggcggtgcgggtgcggctcagagcccagtgccctctgcctcctgttgcctgggccgccagcgtgacccacctggcatggacgcctggggactgagccttgtccggccccctcccagccctggctgtctccctcggcaggagctcggcaccccgcaggttttcttcccaggatgtgcgtctccgattggaaggtggaggagtcacagatgcccctttgtgtttccaggcctggactgggcaggccccggtcagggctgggggaagatgctcagctcatgttggacctgaaggttgtgggaaactaggcccggagtgcagcagtggaggccttgtctgaggggtcgggcagtgggggccccagcagagagcatggggccgacgagggggacaaagggacaagagctcaggagctttggaaagaggtctaggggcctagtgggctccaaggagggcagagaagccccacgtactcctagtaatggaggccgtgcccacctcgtgaaggggatttctgagctggggccgaaggcacaggatgtggtggcgtaggaagagcagtgatggaggctttctccaagatgttggccgtgccgtggagaggactggacgctgggccaagggtggccgcatccatggggcctggagcctgcggactgcaggaagccacagagtgggtggcagcaggggacctagggatggagcgagcccaggctccgtggcaggtggccgggggcatctccccaaggctctgcccctctgcccatcaggtgggaggtgcggcagatggggagtctggggggcctcctgcggaggagggtgtgcgccacggaaggctgctgagccctcattgtgtctggtgggaggcgggcgtcacagctgtgccgagaggcctgctctcgcgtgctgtgggaggggggagacgtggtgagggagagctgggcagggaccatgccgcttaccctcaggacagggtgagctgtcccagcagtggctgagcccgtgctgcataagggacttggcgtgatgtctgtgatcgtgtctgtggttggaagtgacgtctgggctggagctgacacccagctggagctgtgacaaaggacaggatgatcagggaaattgcagagaacaagggcgaggatggaagcttgaggggcgccgaggtgtggagggggtgtcggtggaagaaccctcaggagctgggctggggctggggctggggcgcagctcgtccccgagtccatggtggtgacgctcaggaggcgctggttccagtggggaggttggggaaagcacttcctgatgcctttgggtgtggaaagtggtgggggcagccaggctggttcagtgcaaggcctgaggtgaggttcaggtgcggcccacgggctgtggcagggacgcagcactcagcaggtgcctcagggtttgttggaggtgagggggtagcagagcccctcacacaggtctaggttgcaggttcatggcagctgggtagggacgggaagctccagtaagattcaccatgggatttttcaccagaaactcctagaagttagttctgtgtcgtgagaataaaaaagttaacatgtctttggcttcccatctgctggggagtgtgcccagtggcactgcggaaacccaggccggacctcacaattgcaggatgagcctcctcccttctatccggcaggtggccttctccaggcattgccctgcacctcgaggggcagcggggcttaagtcaagctctgtaaatgcggcacccgacgtctgaggcccgccacgctgcaggttcccatctccaaagcccgtggtgctgggcacggcagagccgtaggcggagacagggagccgggaggagcgtcagatgcctgtggcctctttacagctctgtcccctgccttatctcgctggctctgcccttggtcatcaggatgtgaggcggtgacggacacttcagtgctctgacgcactgtggccccggggaagcgtggtgtctgcagcctcctgggccttcccttctgcctggcttcctcctcctccacccgtccacctgtgtgtctgggtcaggctggcttctgcatctctgtggacagacctctccccgtgctgcagctgttttccttgggttgagcactgaaaagagcccctttgggttaggaggcaggtggacttccactcacatggaggaggagcctcctctgcccggaggagacggtgctgggagaaaatgtagctgcaggtggagattttctgataaccaagagtggatgttgtctgtttactgagtggaggttggggccggtgccagggttgtccatctcccctctgtcctgcatggcatggtggcagagataccaccatacttcagaggcagcagcaccctcgccgggtgccggatctcccagggtccacctgtgctgccctgccctggggtatttggagctgagttccaattaagccaagaaaaacagattgttttacttagaatttagaaattctcctttttttttttttgagatggagtctcgctctgtcacccaggctggagtgcaatggtgtgatcttggctcactgcaaccctgcctcctgggttcaagcgattctcctgcctcagcctcccgagtagctggaattacgggtatgtgccaccgcacctggctaatttttttggtatttttagtagagatggagtttcgccatgttggccaggctggtctcaaacttctgaccttatgtgatccgcccgcctcagcctcccaaagtgctgggattacaggcatgagccattgcgcccggcctagaaattctcttcataaaacgtgtttgagattggcacaggaagtttcaaacagaatcaggattcaccataagaagcagataaatacatttgaggcacccagggtgagtgatctcagcggaattcccctttaagcttcctagtagcgcgtgcaaaaaggaaaacgtgtggatctaagactgtgcacaaacaaaagctgttcttctgggaggaaccaatccctcagcaatcacacttgactccctcgaaggaaagctggaaggggagagggcgtcaggatgcaggtcccggtgtctctgtgcagctcatcctccttcagaggccgctctgcttctgtccatccctccaattgccagtggtgtcagcatttggggccgtgatcagatggaggaagactggcaagcagtcacccccgacaggactctctggctcagcctccccaggaatatgctgctccccaggcacagcggaagacctgctgcgtttcatcttccggctgcctgtttaaagcaagggaggccatgcccccagcggggtcccttgtgcctggacccaaggcaagaatagctcaggcttgttcctttttcctcaagttcctctcgggcgggcacggtgtgtcgcctggacctgcatgtaaacatcagggcggagcaggaatcggcctccaggagggtaattgcctggcgtactctgtcccaggtagtgggtgaaatgaaagtaaaaagccagctggtccctcatgcagattttaggggacaaagttcagcatagaaaggtcctgttacaaggagagggttgtggcgagcccagggcagcgcgcgtcctccccggcagctgatcctcgccatgggggacggaaaggctgtccggatttccgtggcggaaatgaaaagctactacctgtattctgagtggtgctcctggctgctgtccgtggctgagggtgagtctcctcgtcccctgtgagtccctcgcaggtggtgtgctcggagcagtcgaggcggcctctgggtgaggcagcatggaggtgccctctgtggatgccccgtgctccacagggcagtctgtgtcccctgtggaatttgcagtagctcagggagtggggatgagaagcaaatgagcttttcaccctaaagttatcatctgatcctaatttatgtcacagttaccaaaagcaaataacctccttttgtctggcaagcctgagcctcacaaactgtgcaaacagctgggggctcagcctgcaccaggctgccccgcgtcttgagagctctgatgtcccggggccatggctgcaggtgcaggacagagacaaggccgtgaccgaacactttgctggtccccttgaccatgggacacccggtgacgtgcctgaggatcggccccggcacaccgaagcccggtttatgcagagcttcccacggtcagccgtgcagggagctgtgagccccggccactcttcctcttcccgtcccgtggtcagtgagcccccagggccgtgcgtggggctgagcaggtctcctgcctcagaaggcatttccttcattccacctcgaaatccagaaaatgccctggaacaagggctcgccccttcactggctgaatgccatctgtgtgtctgcctggcatgacctgcggtcggggtctgatcctgcctgtgaagacacagtctctgtgaggatggggccgcggccggatgccatgtggcgctttcccggggcccagagtgctgagtccttgtcctcagagttgcagctttgctgtttataaaactgcatccactctcttctgaactcacccgttctgcagatgaggagagtcaggaagtcacggagagaaatgcgcatcacagggttgtcagagcgtcccacgaacggtgtgggaggacacagcagtagacgtcagcaccaccaccgccccattcacacctgggcttcccccaaacctcccacctccccacggtcccactgccctcggaggacccaccgcacaggggtgtttaagacagtggcggtgctcccgggagaccacggggtgtctctgaggacaggcggtcccctgggccccctggttaggacagaaacgcaagagccacgcaaacctctctgtgacactggggaccccctgagggagggaagccccatcggagggtctgctgggcgggcctgcctgcctgtgggtggacactgggccgagggtgccaaccctgcccacggggcctcagtcctgcagccgggtctgcactgcgccctcactcccctgcctgcctcacagaccgtgggggctcccccaacagtggcgcgtacgctgcactctgccagggccgtctagggttctctcaggactgtggggatgcctcaagggtggcaggagccacttttggccaatatgcagttagatttgataagaaaacaagctggcgtcctgcccaaggctccggggaggtttcaggtgggactcggagccagtgtcggagctggagcacatgaggtcgcggggccacagccaccctgggctgccgcatttccatctcggtgggtccttttacacagatggcacccggtgaactcactcagtggagctgcctttccctgaagccattccttcacccggctgcagggccgcagacagcacgggccgcagggtctctgcagcttgttcaggttcagattggatggggtcccagaaggcatctccctccacctgccccttccagcgctttcccgaaacgctgttgtctgcagccacgcagagggtggcgtgcgcctggagcacaccttgtggacgcagcccagggctcgttgtctgccccctgatccacccagcacaaggtcagcaccagcacccattggtctttttcctctcttgcttttcactcactgctcacactcccttcctcagacaaattaaaaccaagtcggagaggcccagcaggggaagcagagttggccttctgcagccgcacagttgagtcctggagttcagagattttagctgctctgcccaaaacggtctggcagactaaggaggaggccgggtgtgaggtctcggcctgcgctgcatgcaacgttttcacttccatggtagtggcagaggaaagggaagtcctccatactgtggcttgctggtctttgcacggtggtgagagggttgggcgttgggctccctcgcccccatccggcctctcatccctgtccagggcctggaaggggccagtgtgtgtctggaaagtgtgaagtctggcaggggtgtgggaagtacccatgagcaccatcgctgtgggcggacagtgatgggattgtccccctcgtcacagcggacctgtgagaaatgaccagaactgaccctgcccagcccacaaggggacagcctcatccaagcaacacacacccattgtcacagttacttggaatcctgctctatatttttgttcttcagagaaggggaaaagggctgggcatcagaagattgctctgaataaacagtgtgtttagaagagagtcacagggtcaggctgcggggcgaggaggcctccttctggaggtgcacatgccactcgtcttggggctgagaccaggagtttgcaccgattcagagggaagtcgacggcatctgtggcagcgcacatgtacacaccgtgtgtggtggtgcagctgcctctgcccgggatgcatgatgctctctgtggtcctcgtctactgtgttttttttttttaattctacatggtgagccaaaaaggttgttaagcacctttggggtacagccctgccatgataagaatgtatttctaaaatagtggaaaggaaagtcgtggagaaggccagcacctgcccggtgtggggagcagggcccgggcacgtgaacctttccctgcggagctggtgcctgtgggtgcacgggtgtggtgcgttttaattctcggcagctctgtgcggcctggagggacgttctgtcctgagcaggggatggagctaccacacccgagtcctccctgagcaggggatggagctaccacacccgagtcctccctgagcaggggatgggctacgacactggagtcctccctgagcaggggatggagctaccacaccggagtcctccctgagcaggggatggagctaccatgcccgagtcctccctgagcaggggatggagctatgacaccggagtcctccctgagcaggggatggagctaccacacccgagtcctccctgagcaggggatggagctaccatgcccgagtcctccctgagcaggggatgggctacgacactggagtcctccctgagcaggggatggagctaccacgcccaagtcctccctgagcaggggatggagctaccacgcccgagtcctccctgagcaggacatggagctaccacgcccgagtcctccctgagcaggacatggagctatcacgcctgagtcctccctgagcaggggatggaactaccacacccgagtcctccctgagcaggacatggagctaccacgcccaagtcctccctgagcaggacatggagctaccacgcccgagtcctccctgagcaggggatggagctaccacaccggagtcctccctgagcaggggatggagctaccacaccggagtcctccctgagcaggggatggagctaccacaccggagtcctccctgagcaggggatggagctaccacaccggagtcctccctgagcaggagatggagctaccacgcccgagtcctccctgagcaggacatggagctaccacgcccgagtcctccctgagcaggggatggaactaccacgcccgagtcctccctgagcaggacatggagctaccacgccagagtcctccctgagcaggggatggagctaccacgcccgagtcctccctgagcaggacatggagctaccacgcccgagtcctccctgagcaggacatggagccaccacgcccgagtcctccctgagcaggggatggagctaccacaccggagtcctccctgagcaggggatggagctaccacactggagtcctccctgagcaggacatggagctaccacgcccgagtcctccctgagcaggacatggagctaccacgcccgagtcctccctgagcaggggatggaactaccacacccgagtcctccctgagcaggacatggagctaccacacccgagtcctccctgagcaggggatggagctaccacgcctgagtccttcctgagctcttagactccatgcgagttcagtgatgctttcttttctaatttgccaatctcttaaaccagcagtccccaatctttctggcaccggggaccagtttcatggaagataacttttccacagatcaggggtagggatggtttcagggtgaaacggttcacctcagatcatcaggcattagattctcataaggagctcacagcctagatccctcgcatgcacagttcaccataggttcgctcctaggagaatcaaacgccactgctgatctgacaggaggcggagctcaggcagtcctcactcacccgccactcacctcctgcttaccccctgttcactcacctgccgctcacttcctgctgtgcagcccgaccagtaccggtctgtggctcggggcttgcagacccctgtgttaaaccattcagatctgtgggaaccttgtctatcctgaaagtgcaggaactaccacacccttcgtcactttcttatgtttaaagacccctggaacttacagaatgtggtggctacaccaggtccagccctgtcgtgggatatttgttccaaaccctgcagtgtcaggtaagttcggggacaggagaccactttgtcttcaccccagagaagcctgtttttcaaggacaaagtaaagagtgtgctaagcaaacccagtgcaagtgcttatcccacatacggtgccttgagaagtgtgacataataaaccacccggtggccgaggcggggagcagtggctggcagagaccctcgcacagtttccttcagaatcacatggaggggtctgctcttgcaaggagacctttgctttccatgattgccaagagcagttcagaggactttccacgacttctatgtacaggcacgaattttcagaaaaccaaactgctttctgtgtggagctaagaacaaatgaattagcagaagatgacaaaggtcccaggggtgcttttcttcatcccgtccttcttcacttacttgggaagtgtgtgcccagcgtctgctctgtgccaggccaggccaggcccaatgctgcagggaaagcaaagaatcagtccctgttccctaaacaacgggcagggatgacctggggtaaggagaactggcgtgcttatcagctttgaggagagcgcagctggctgaatgcgctcctgaaaacccgctgcctcctcccctgagccaccaccctgcagccatgtgacagtaaactaggtgtttgctggtacattgttgccacagagacaaaaacaaagaaagcctgctcggcctccgccacctggctctgcacctggggctctgtacctgggtccagctgctctgtggggcctgcaggaggggacgggacaggagctctccttccaggaagcagtctcagctgaacttgagtgtggccacagcactgccctcactgaggctttctgcgaaatccggccgcctgccacctgcttctgttaactttgtacacgttgtgtgggacctgattcgctgtgttttggggggcatctcccgggacctgatttgctgtgttttggggggcgtctcccaggacctgatttgctgtgttttggggggcatctcccaggacctgattcgctgtgttttggggggcatctcccaggacctgattcgctgtgttttggggggtgtctctgaggacctgattcactgtgttttggggggtgtctctcaggatacgaacacctttcagacacattatccagttacagtactcattccacaaggaaataatagcagatttttaaagtgtgacttcattagaacattggaaattttattagaagttgctaagtatttcaaaaatctatcagaagtttgcaaatgattttataaagacagaccctcaagatgacagctcaggatgcaactgaaatttgcttttttgagtgtatttggcgtttgctgtttgtgaccctgattttcatgctctgcagcagtctgtgctccctggccgggaaagggggtcatttgctcagagccaggagcccttccctgcgggttaagttaccggaagtcatgtctggcagggcaggatttggctggttctggtctcaaccacagccgactccacagggcttggcctatgtgggattcagcccacgaaaacaatttcttgttaaaagcacctgtcttaccctccctagtgatctcactgtatttaaaatatttatttaaacaaggcaagtattccctttttattacaggttgagtgccccaattagaaaatccaaaatgctccaaaacctgaaacttttgagctctgacatgacatcacaggtggaaaatccacacctgacccgacagtcacagtcaaaacttatttcatgcacaaaattaaaacagtgtataaaattaccttcaagctacgtgtatgaggtgtgcgtgaaacataaatgaattttgtgtttagactcgggtcacgtcccaaatgtctcattatgtatatgcacatagtccaaactctgaaaaaaatccaaaatccgaaacatttctggccttaagcattttggatatgggatacccagcctgtaggagatacttggccatgtttagtgggagccaatggatgtatacctaagaatctgcctaaacctcgaccgtgcttcctgatgtcatgaggcccagtcggaatgtgcccgacttccccatctcagtgagggcagtggaaggggaagccgtgctcctgtggggagagccaccacccacccaggtgctccagacgttcccgccgtgcgtctgtggtggccacgtctcatcctcagtggctgcacgtctgttccttgggagtggattagggaaataagcgtggcctgtaggaagctgagtttgaagcagtgagctgggcccactgaataatgatgtggaagcttctcagcccagtctcgtttttgtgaaatggacactgaatattctagctggggaaaggtggaacttggcacttacgtaacttacccttctccccttggtgtttcgtagccaatcatttttattgcattaggtctcctatactgtaaatctacagaacatcgggaacactgaaaagttcacctcagttctggctttaaaagcactgactttcacattatatttgagctaggacaaaagaaaacatttctctgcaatgtgtgttcatctcgtaagggtgtctacactgaggtcagaccctggtgcaaaccccaaaatacttacagtggcagccccggctcagtctctgccaaacgtgcgcgggcatcaggcaggagtccatgggccatgggggtgaggagagagcggctcgctgccttgagaagctcccgcttctgcagtaaggtggcttttaagccagagattaccacgcgctgccgcggagggagaggtagcgcggggcatggggaggccacagagaggctgtactgacagaggctgggggaggatctggtgatggagacacgatggcacagccccggtgaagccacgtgatgtcttcgtgtgaacatggtggcgggggagcgccgggcacacaacatggtgggtgttcctgggcagaggcttggtgggcagtaggggccgacctgagggctctggggtcaacaccggtccaggaatttgactgttagccacagagaccgccaggagggcttttaggagatatgtgaaatgagactcagctttcagcaaggaaatcagggagcaggtggcagtcgggagggactgcatggaaacaagtggcttaggaccaccctagtcgttcaggcgtgggatgaggctccaggatcgcagccacagaagtggcagtgggaggggagggggagggtgcctggagagaggtttcagggcaggagggacggggcttagggatgtttcttggagagagggagcgagaagtcatcgtcaatggccccacgatgtcaggcttggaatttggggtggacggtggtgccatcagtcaagagagacttcagagggagaggttaggtgatcccatcccattttagcaccagaagtggctgtgtgagctgggaatggggtcctgggtgaagatgacaccacagataccttggagatctgcctccagttaagagacgtgtttgcctcctgggtgggtaggattttcccctcccttagatcggaaggcgaagaaggtgagatccacagctcgatttcccttcagataaaaggcacaatcacaacagcagcaaacacaccttcattttaaagacagcagaggaggggtggggtgggagggcagtacccaggacagggtcccagccgaccctccgccttcgtctttttcctgattaaaaaaaagcaccttcatgcggggtgcggcgcttgggaccccccaagctgacgtcactgtctgtgccggtgtctcgggcaggggcaggtgtggatgccaagctgacgtcactgtgccagtgtctcgggcaggggcgtggctgccaacggggcacggtgcgtgggatgccaagctgacatcactatgcaggtgtctcgggcaggggctggcgtggctgtcggcgtgacggggcgcggcgcgtgggacgccaagctgacgtcactgtctgtgccggtgtctcgggcgggggccagtgtggctgccaatggggcaaggtgcgtgggacgtcaagctgacgtcactgtctgtgccagtgtctcgggcaggggctggcagggctgcccaggaggctgtcggtggggcagttcctcatgaatctctgagctgagtttgtaaaagtgtgtgagagtggggaaaatatgggtgaaaatattttcagacatttggattcccctttggtgagctgtctcgtttcttcccgctggtcagggatgtggctgcttgaacagctgggcgcggtgaccaatgtgtggagagccgggaagcctgcggtgaggccgcgcgatgtccttcatcccgggcagtaaatccagccccgagggtggggcatcctcccgggcacaggctctcctgcctggggtcgccgctgcgggcaggacatatgggcctcccaagcggtcccatctacacaggtcgggtagagtgagtcggaaaggccaccgaggttgggggctgcgcagccagtgggctgggctcaaacccaggcctgcgcttcccctgtgagcccaggcagccctcgacctgtgtgtggctcggttttatcgcccaaaaaggggaacaacgcctgcgtccgtgtgcaccgggctgcggagacttccccaggtttggctccaggacggtccccaggggcgcctccctccatcccctcctgtcctgtcacctttctgcacacggtgtcgcatcctctgacctgcgtggcactcacgtgtgtctgcccctcccgtgttctcctctccaggatgcggctgtttggtggcactccgctgtgtcgaggcactgtgcccgtgccccgggctcccctcgttttacagactcgctcacggaggctcagggcgtctctgagggcacgaagctcatgtcagccagcagaatggggatgtagaccggggctcgctctcgagcctgtccgcctcctgaacatgcctgtttgctgagcatatgattaagagaaagaaggaaagagggtccatttgagagcttagggcagcgcccagtataccgtcagcactaagctgtatgagagcttagggcagcatccagtatacagttgtgcttagtacgtgttggcactgcaactgctgtccttgccgctgtgtgagctgctgctgggtggcagtgtctcagggctgccacttctgccccaggagagcagaggggagctggcggccgaggtggggtcggtggtggggtgagcctgcggcgttgtggctccaaggcctgctggcctgaagtcacccccgggatgtgccccgtgtgggaccgtgcgggatgcagggaggagcgtggctctgggtgtggaggtggcgggctgctggcatcctgtcaccgaaccctccttccacaggaacgggggaatgagtgggagagcagtgggagagtgtgccctctcccccagactcctctctccctgtggcatgagaagggtgggatctggcttaccaggtgagtgagcaggcgtggcccggaagtccgttcagtcctgggcgcacccacaggaactgacatccgcatgccaagcagcacctggcggccaccggggagtgatgccgggtgcagcctttacattcatcccaagcacagtacagccctgccctcaccccatgccaggctgactttcaccagatccaagcctgacgtcttctctccacatagtcccgagttcccctcccagggccccatttagagacctccccttttcccgaagccaccagactcatgcagtctccaaggctgggctagccctcgtcatcttctaaggttatcctacatcacaaaggtaaatggcatttaaaataaaatgtaggccaggcttggaggcgtgcacctgtaaccccaggagactaaggcgggaggaccacttgagctccggagatcaaggctgcagtgagccgagatcgcattattccactccagcctgggtgacagagcgaggccttggctagaaaaaataaataaaaggcgttgactttagagagtttctgacaaaagaatggaaatgtttctggtccctgcatctagccagctgtagtgaccccgacacgccaggatgggccgtgctaccctgggctatgtgtgcagcggggctgggacgggccaggctcgacctgtgctgtgattttccacccagaacgtcgcaaatgtttcccaccatgtggaacgtctgttggggaaatggtgttccagagtgtgcagtgcccttcagaggccctgcgtctccatcttttctccacggcatcctgcgaccgtgctcctcaggtgtgccccacgggcccgggaatgtccttcttggatgcgcccgatggtcccgagactgtcgtcctcagatgggttcatggcccaggatggcatccaggctcctggtgagccctgtgggtggagacctggtgccgcccctcctctctcctgagtcctgatggctggcagtgccgcccacggcacctggacgggggctgtgttgtgttgtctgcatctgtgcacagctgagcccctgcctaggatcctcagctgctttctctggcttcaccacccccatgaaactcctgcacagatctggacgcaccctggcagctgctgggccagtcccgccctcgctatctcaggtgtggccgggcagctgtgggagctgggcctaggcgggtgctgctgccagccccgggccgccctcgcctgcactgctttcccagctgagcggctgcttcccgtgaacggagggactctgagatcatctcgtcctcacgtctccatctggggagagcaacttcccagctcagtggcagacccagagccccaaattcccatcgagagcctcgggtgagtcttgagaccaagaccactgtgggtctggcccaggaaaacacactgccctctctctgctgcactgaacccaggcagcagatgccatctgcgcttccaggtttgcgatggggttgctgctgacgcccctgtgcagggtgggagccgaggagctggcagacagactctcagagcagtgttacacaggcagctcctgcagacacctgtgtagacatccacgtcacccatagctgggaccccgtacgtggacagcagagtggggggcatgggtgtcactgacctttgccccgtgtccactgtcccttcagccccagccacctggtgagccgcgccctctgcatctgctgctacagaggtgttttatttgacttaaggtttagctgtttgctttggcagcaggtcccaccccacagcctgatggctccagacagggctgaccaggtttgtaaaatgaaattgtccatccgggaggaggagaaagcaaccccccatccaggtcggtcaccccaccctcgtccgtcacacctggtgccatcactcccacagctccttggggtgggaagcgatgggtcgagttcctgctggacacgggcctcaggccccccgggtgtccccaaggtgcagggaccagcgtggtgacgctcattgttcagagctgctgatctggggctggcgtgtgtggtttcctctccaggcagggagcaccttcctgtttaactgattgggacagggcaggagtgggctcttggctgaggtgctgggcctgcccgcagcagcagctgtatgaagccggtgcgtcggctctgtgccctgcgtgagcccatgtgtgcggggcctttgtgttgcacttcactgagggccccggggtccactgggcacctgctgggctcaaactgcagtgcctgggccactttccatcctgtgttccgaaccccgtgcacagcgcagctcctagacacggtcattcatgtaatttctaggcacatttgtaaagcacaacacacaaataaaaggtaagggccaaataaagcacgaagtctcctcactgctgttcttgggaaggcagaacttaaacgtgtgaaaaagctggaaaacagcataccaaatacaacaactagaaacccagggccctggcatgtcagggaagggggagctcagagccaggccaagcgtgaggaggccgtgagccacaggcctggccggggctgttggggaaatgggctggggacatttctggagggttccggagggtcctggaggcctcaccaaggaggctggagtgattggttacattattcatggagctgactgggctcccaggacgggtctgaaatcacaccaaagggaagcctgcaagaaatcacaagaaatgtgctttcctgggggatgggatggtcgtgtgttcaaaatgtgtgtccctggggaacggctgtgtgtctggcatcgacttggcctggacttggcttctctactgcgctcccgatcccaggtgtggggtcgattctgtcttgcgccgattggaggcctctgctgtgggtgtggtttcacgtgcactgtctctggctaaaggtctaggtgcttggaacagcttttatgaatcggaaactggacagaaaccagcctgaggccgtgcgagctcccacggcccttggaggaaagctgtttcccatctccagccagagaagctgcagggatgcctttggccttgacttggtcagcagggagctggaagggtcaagagctgtgggtggggagccctcagtctcctggactgagtgagaaacggtgggtgagcagccatggccacagcgatgagcccgggatggtttcccgtgtgtggttcgggccacgtgttccggcctctgatgggcattactgtggccccccagggacacagagcagggccagccctccctggcacagggccattgtgagccagtccctcctgaagatggccaggtcctccccggcttggggccagaccgcctgggtctgccctatggtgactgttgcgtggcccccttgcttgttgagcaaatccatgagactccactgtgtaccctgaaggagcacagcctttgcccaccagaaacttcagtgtgacaagacatcgggggccaggagagacgcacagaagaggggagcagctgatttctcggggtccttgcatctgtaccaggggcccctccttccccacacgacgccctctccttagaggacagcctctggcaccgctcactcactgtccctctgtttaaaaactgaggcccttctgtgagagcctcctgctcagaacacagtcctctttttcggctgatctttgctcactccatctgcatcagccgctgtacggctggctgcctgagacgtcccagccctccgtgtcctccagtgctgggagcaccgagggaggaggtgggccttgggcctcgggggtctctgcaggccttgagcacattgtgggagagggggtgtttggtacatgtgtcccaagcctgaggcctctgggcgtgctttgctgttgggggttggaagctggaggtgaggacacgttggactgtgctcagctgtgaggggacccaccgtgtggcaccgtgatctgctcctgtgcccctgccgcctgataatgtaggagttgtgcctgcaaaacatgcttcggacattagagtcggctgggaatgaagatgcctgcaggccccagagcacaggcagggctgaagtgcgggcggcgagtgggctgggaatgaagacaccggagggccccagagtggaggcagggctgaggcacaggtggcgagtgggccgggaatgaagacgccggcaggccccagagtggaggcagggctgaggtgcaggtggcaggtgcatcggctggtgccgtggtgacggcgtgaggggccatgatgccgtggcctcccccggggctcgtgttccagggatagctcatctgggatgcgttctgacggtagaagataggaacacagagatcccagacacaggaggtctgggtcaatgtgcacagcccaaacctgctgtggctcagggggcagctcacaccgtgggtaccagccagccctaggtccaaacttacagggaaggatggctgggctggggaggacaaataattatggatggacatcacagcccctcggtggtcgtgagtgggtgcagaggggcttgcagaagcgacattcctgccccagggatgaggctgcctctcagaggacccaggcgtggaggaagcagtggcccctcttaggcatccctcccctaagtgtgtgcagcgtggagatgagagtcttggcccaggaggaagagtgagcttccagacttagctttggtgcttgtcagcgcaatcatggctgcaagaaaagcctccatggctgatgttcccagaggcagggcctggcgaggccacgctttcctctccagcaagcgtttggacctgagggagccgaggtttccagaggcaggagccaggtgtctggcatttggggtcagccacccccagaagccggtgttcccagcgggagaagctgaagcctggagggctggctgtgctgtgctgggcacacgcagggcaggagtcagtgcacatgtaaggctctgcggagaaaggcgccggaagaggccggggccagcagggacatagcaggccggggtcccacccaaacccagcacccctcccaggccttctcggctggggctgactccagcagtgggtgtgatattctcaggagatgtgcgttgactccagcactgggtgtgatattctcaggagatgtgcgttggtccccttagctccttgggattttcggctcaaactctgggcctggacaaatggtctcaggtaacttgggagctcgtcagggacagaacctgagtttgaacgagctctctgtgggactcccacccagggcagcggttaggagccccctcctggactgccagttttcaagtgacgtatttaagtatccccctcccggtcctggaaaagtagagaggcagccgggagcctgccttctgtgttctcggtgcaggggtattctgagaacggcccctgctcacacgggtttaaaaggaactcagtgaccacagacggatgagaacagcggacgcagctgcctcccaggcactcaaaggctcaactccccacaggcgtgtgttgccaggggcagaaggcttggcccctgggtcagcatactctccggacagctcatccctgccagcccaggtccctgcagccctggggctagcacaggggatgcggacctcggcctaggtccccacagctgtggggctggctcgggggacggatctctgctaagcatggcccctgccagctcaggtccctgccactcagtggatgggactttggcggagtgtggggcccctgcagggagggtctagacaagcaacaccaggaacctgaagcctccctggccggggctcagctgtcgccaggatcgcaacagttaagctgcctgcagcaggataagtgagccgatgctgctccttaatcagggacatcgaatcggaggccctgggaggagcagccggctggctgccctgcagaggccaggtctgcccagcaaacccaggaaggtgtggcgtccccgcttcgcggccaagatggtgctggtgctgcgccatcctttgtgtgcccgggaagggcgttccgggagccgggtcgggggctcctgactcgcactgggcagcatgacggtgcgccggctgtcactgctgtgccgggacctctgggcgctgtggctgctgctgaaggccggcgcaggtgcgtggggcgcgggcgggtcctcgcctccccggaaggtgttgtggggcgacagtgcggggacgccgggcgggggtggacgttctgggcccagccctgtcctcagaggctgctggggcagaagcccggggctgggggatgccggggatggatgttggggtgggtgcctccgagaccagaggagccctgttccttggcagggaaggtgtgcacgggccttgcccgatggatggtttagggccatggccctggggtccctggtgagcagtggggccgcctctgcccttggcctgtgagggactgtctgtgctggtcccagaaggctgggatcacctttccactggctcctttgttcgaggtttttcatagacaggctatgtggacaaatgagggcagcgcccacgtctggctggtggaggggctgcggctcctccttggaggggacgcctggccactgctgtccccacaatggggccacccgtggtgcaaggcgtgacaagctgccctctctaggtaagcaggacttgggaggcccctggccaagcctgtggacccggctgggcggcctctgtggtctcaggtttgggtgtgtttggtctggtcagggctcaggggctgctggtccacactggccccatcctgacaattggagctttggggcaaggtccctggagaaggggtcacgtggggaggaaacagcctgggttttgttgatgcttttctaagaatggagtactcgttttcaagagatttgtcctaattatattttccagcgggtacttatgccaagtattgatgaataattcataaaataagcatctttgtgaattttagtgaatcagaccttaactatcaacggcaatgaatgaacatctaaagtttccaattttaaagtaaagaactggctgggtacagcagttcacgcctgtaatcccagcactttgggaggccaaggctagaggatcgcttgagcccaggagtttgagatcagcctgggcaacataccaagacctcatctgttaaaaaaaaaaaaaaaaaattaataggctgggtgtggtggcgtgtgcctgtagtcccagccacctggggggctgagaggggagaatcatttgagcccaggaggtcaaggctacaataaggtatgattgcacaactgtactctagcctgggtgagggcgtgagcaggtgcaggtggccaccccaggttatggggttggctgtggagcactggggaaggctccagggtaagcaggggtaggtggcccccgtgggttttggggttggctttggggcaccatggaaggcttcggggtgagtaggggcaggtggccccctgggttatggggttggctgtggagtaccgtggaaggctttggggtgagtaggggcaggtgaccccctgggttatggggttggctgtggagcaccgtggaaggctctgggttgagtaggggcaggtggccccctgggttttggggttggctgtggggcaccgtggaaggctccggtgtgagcaggggtaggtggctgctttaagagaggttgtgtcccctgggtgccccctggttttgcacccctgaagccctggccaccccatcctgcagttccctcctgaaggaccaggcaaagccaggaccaccctggacaagaggaggaattgtccttctgagccctgacggttccgtgatcagacccgggacctgctccaggctctgttttagtgtctcacgtcctcttagggtacattgaagaagcattgtcggtgccagggtcagccagggtcagccaggcctgtgttcctcactgtgcccctcctcactcctgcagaggcctagggacctggaaggaacttgccacctgtgggtgacctttctcagaaggtaaaatgcagggtggggcgagccccactggccttggagagtctgtcctcgggcccagagggtgccagttgggggaggcgcagaaggactgagacacttggattccacagagaggtcaccgtggtacagtccagactgttgtttttaattttaaaggaaagaatttgttatgacgactgttctcattctcctttaggcatttttaacatgtgttccaggcagaccaggctgtggcccttccctcgtggctggtgcaggccacgcctccccccggcccagcgagtagggaggtttggctctggcatgaccctccggggcacaagtgtcctcggggagctggtccctactacatagaggccacctggcgtcacttggcagaggaggacggggcaccaccctgcagagaagcgtccatctgcccgtcagtgtgcggccacacttggtggtcctcttcaccttggcctcttgttgagcgcacctcccacctgcacagcatcctgcgtcgtagccaacaccacctcctccatggacctcagtctgcagccgtcactccatgtctgcagctggggccctggccagcccccatggcgcagtgctggggggttcctctgggtccctgtagcctccataacataacctgggagcaggaagatccccctgggtctgctcacctggtggggggcagccatcaccaaagccgtctgcctgcatcaccggctgaattgcagccatgatcccacaaggaagccttgtctcagctttacagaggaggaggaggcccagagagagaaagcaactgcccagagtcacacagctcagggaggttgtgttcagggtgaggtctgtgctcccgcagggccagtgagtgtctttcctgtggcagccgctggcccacgtgtgtggtgatgacaccaagcacacggaccacgcgtgtgttcagatgctgcctgggcttcacgttggtgcccatttctctctggaccttacgaagacaagtttgcggaggcatggcagcccgtgcatgctgttggtgggcacgtaagttggtgcaggtatcacggaaaacagtgtggggtatggaggttcctcaagtaattgaaaagagcactgtcgttggagccaggagtccccactgtgggtgggtatcggggaaaggagtgagcgtgttaaagagccacccgccctccagagctcaccagcccacacgtggaatcgaccccagtggccgttagtggatgggcgcgtgaagatgatgtggggcacacacaatagagtgctgctgggtctttgttagaaaggaaagcctgtcattcgagacagcacggatgagcctggaggacagtgctgagcaaaatcagccacaggcaaagccacggcctgctgagtaaaaccagctgcaggcacagaaaggcaaagccacggccccactcgtgtggggtgtcagagacgccgacaagcacggtggctactgggggctggggtggggaagcctggggagatgctggccggaggacacagagtttccgttgtgccaaatgaatgaagtctgggggtctgttcgtggtgggccatggactattcgtggtgactgactgtggtctgtttgtggtggccgtggcgtgtttgttgtggccatggttggtttgtggtggccgtggtctgtttgtggtggccgtggttggttctgggtggctgtggtctgtttgtggtggccgtggtctgtttgtggtgaccatggttggttctgggtggctgtggtcagttcatggtggctgtgacctgttcaaggtggccgtggcctgtttgtggtgactgtggttaacgctgtatttgtacctgaggtttgctgggagtggatgttgggtattctaactgtaaaaggaaatggcagctgtgggaggtgacagtcagtcaccagtgagtttggtggtggctatggtttcacaacgtgaactatatcaaaacagcacgtgtgcgccttaaatacatacaattatttttctcaatatagctggaaaaaatagccagaagctgtaagctcaggaagtgatgagccagccaagggctccgttcacaacaccctgcacagtgaacagagctgagtaaatggggctgcttagcgaaaatcatcggactcgaagctccctgatggctccaacatcttccgtgactctgggcaactcctgtgcaatgggaggccgtgccctgccatgtccccgccttcctgcccacaagcctgccctgtcccagccactggggtctcactcacccatcagcctggaaacagacgcatgtcggcaccctcccagcccctctgcgagagcctctccatagcctcgctgttgagcccgtggcagtgaaggtcccaggcgctggagcagacggcgtgggctcagtcctggcactgcctgccctgcagtcctgggctgcttacagctgagcctgaccttgaattccccgtctttaaaacaaggatgatgaggcttcatgctccctaggtcctcgcgaggactcactcaatgcactggagccaggtgtgagtaggaaacctgcctttctggcctgatcctccccccgggagcacagggtggtcctcatctgaaccccgagggggtctccctggcatgccctttctccctggacccctagccattccaggtgcagctgccagtgcgacccctcctgcggacaggaggtccatgtgagggctcagctgcctctgaaccggaaaggcgctggcaggcagtggctgggagagcaggcgcaccctgggcggcctccaggagagaaagggagacgtgtgcatctcagtgggggctggcgggagacactaaggtgttgaagaccctcgggtctgggccctgtggaaatgctccctgcgggtgccaccagccctgcccactcagcagtcacttgagaacgccccgagcatctggcccaggaggctcggcctggagcctcacatgtgcggaggtttggctcagcccccaagggcaggcccaggtctgtggcggggtgtggggaggcagcggagccatgggtactgtgtagcgggtagggctgtgaccggaggtggcaaagccggcagccagcccggcccttgggggagagggtggcagggtcagggtctctgaactctggaaggaacctgcgtccctcatcctgaaacccggcctcctgtgtctctcagacagtggctctcagtcactttggtctctggtccctctgccccttgattttttaagttgttctagctcagaagccattgtgtgtatggtgtgactacaccccagccagggcatgagtgcacacagatccagggtccgtgcagagcccgccaggtgtagggtggatgctgaggcccacctggctgaaactgcactcaggccattttactgatgtcaggaaacgttcatgaaaatgcaagctggtgagcaggcaagtgcccccctgcatgacagaccctcctggtgcccctggctcagacagtgtgaccttgagaacagcgggggtctaacccctgaccccagcgtccgtgtcacctgggagcctcaccttgagacccctgcgttgtggttctgaaatcacttgagtgggccgtggccaccgtgaggcggagaaagaggaaatacctgccagaagatcaaattgcaatccgtgtaatttaaagatctcactgggctttgttggcgattctagagtggggcagcactgcattccatgaactagaattaagagctccagtgaaacacgcagtgcggggccggctgtacagacagggctgaggaaagcagaaactgtgcaaacgcggttcggcggcctcagtcactgtcctttgtaagcttggggagtcggcgggagagacgtgacccactggccacttcaggcggctctgtgtcgtaaggatcagtttcacattaggtgattgccggacttacatcaagcttgaagaagcagaagatccctgcacacacgtgtggcccagaccaagagccgtcacgtgacaaactttgtgcttaaatgggtttttagtatgtgtatcttttctttttcttttttttttttttttttgagatggagtctcgctctgtcacccaggctggagtgcagtggcacaatctcagctcacagcaacatccacctcccaggttcaaaagattctccagcctcagcttcctgagtacctgggactacaggcacctgccaccatgcccagctaatttttgtatctttagtagggagggggtttcgccatgttgaccaggctggtcttgaactcctgacctcaagtgatttgtccaccttggcctcccaaagtgttggcatttataggcgtgagccactgtgcccggccaagtacgggtatctttttggcagtgtgaagaatttatttaggcttgactgttttaaagcaccataatgaatgtataattaagttatgataaagtcttaaccctttgttacaggggaacggtaatgttgtgagtggctgtgtctcagcccctggactccagcagtcaccctcataggagtcccacctctgcgggcagctcagagcctccatgtttttatatttaattctcatggttaaattcagtgccgtaactcatggaattaagtctttttaaaatctaagcaaactgtctttaagacagaaaaagttgggtaattcttcatctatttgaagtgatgctctctggatgggctgcatcctaagaatgtatcaaaagtggaaattctgaccactgttttgattgtccttttacatattaaacaagttgagagcaagaacaacaaaaagagggacctccgtgaccacgccgaggaagacagagcctggcctggttggaagattggcctctcctctgtctcctgttttctccaaggtccgataacaactcagtttcccttggagtgtggggacttcattttgattttcagtctgatctgttggggtctaggcaggagcttggtcccaaacaacacacccatgtgtgctgaggacacgctccaggggattcttacgcccgcctgcatcagagaacccaggtcttgtgggcgaggcagcgtggagagggagcgcagctctggagacggcccccagggcttgcgggcgggcgggcgaggcagcgtggagagcggagagcgaagctctggagacgacccccagaggagattggccaagtgcggatgtgcgagtcctccctgcccgaggcgcaaactgtctcactccaaagggcgtccggagggttctgcggggcggctgtgcactgacacctgccccccacgtgggagtccgccggctcctggcccttgccggttggtgttgcgcgtctgagatgacgcccctgcggtaggagcggggtttccctgatcaccgcttcttttgaccatcttttctggcagggccttgtatttttaaaatgtgtaaaggttaagctttctgagatcagaaaaataatatttagtgaaccatgtgatttaagtcactgtgtatgtgacatgaaatatttatacctaacccactagcaaatggctcgttaaacatatttgagatttaatgtaagtgagaattctgccaaccaagtcaggataaaccttaaacatcgggaatgcaaaatcaaacagatcctttaacacacatcacaaacagaggtgtggacgccccttttgtcccaatggcagggacggggcgctggcccccagggtgtcctgtttatcccctgacccacacagtgtcaggagcttgtctggaggggacggggatgctggcctcctggggtgtccttatctgaaggctgtggtttcaagcatcctccttactgaatttagattttgttccgattttgtggcctgcgtttcttcttactgccctgctctgtggccctgttcttcctgggtttggagatcctcaaggatgggcttcgggaaggcctctggccggatgatctggtgacgtaatcccatctgacgctcagccttggactttgaaaaggcacgactgtcctgtctgatggacaggatgcagaagcctttgggaatgggcattttgccagaataaataaaagaagacaattggcaaaagatggactgtaccccatggccccaggctgctgtgtggagagacttgtcctctcctctgcccacggtcaccagtgagcaccagggacggggtttcctgctgcacctgggcctcttcctgctgccaggagctgccttgctgcctccacctgtgacagtccaccccccataccccccccacccgcaccatgagaggatttccagggcccacccgcctccagtccccgttctctctgctgctttcgaggtcaccctgggctggaaggggtgcctgggatactgctcagacgtcttggccgccctcccaccccgcaacaccccgctcctggttttcaggatgaaattgtcctcaaataaagcaagcttttgagtcaacttgcaagaggaaggaagtttgcttcagtcgtctggttttgttggaacaaagagatctaaagatagacacatggtccccctccctggactgccattgccaggaccctgtttctgtgaggaaaagtcagtggtggggcctcacctgtgtatcaggtgagccaagggcacctctgcccttcccacgcttgggaaatctcaccacgtcgtccccgtagtggccagaagagattggccctcccaggtggggctgctgtggtcggtgctggggatgggcaggggcaggcctggccaccccctcgtcggccccacctgctgcctctgcccgcgtggcaggggaatggacggggcagcctctgccgggcctcagatgtgaggccctaaccctcccctctcagacctgcctctgagcagtggggtcatcactggggagttggttggagcagggctcagtgagggagctgggcctggcctggccttgggtggcacatacgggtcaggggcccaccacctcccagacgtctgacagcacagagccccacagaggccatgctcgcctgcctgcatctcctctggggacctgtctcctgaactgagtggccactattgttcctccgtgcgcttcttagtcttatggctgcaaaattaagtagactggaacttttaaagaaactatgatcataagggcagattttcccatcattcttgagtgggttcaaaaaatcaagaagaatgaaaacttacacacataaatggaagaaacgcccagcgccctgaaaatcccagggccccgcctgcagaaggcctccatgaagaacggaagaaggccaacactctggtgtgggtcagagagcatccacaggcctcttcaggttcacagagtggccagtgaccacttcagatgtagcgatattttagagtttatttgtatgagggcttagctgtgtgcagtttctgatcacacacagggggatccctgcttttcatacccaaaatgaggcatttgatctgagggacaatatttagagtttgtcctggcccagagagtccagaggcactgcgggctgccagcaggtagacagtgcagtgcagatgatggacaggtggtgtggacggtggacaggtggtgtggatggtggacactgcagtgcagatggtggacaggcggtgtggatggtggacaggtggtgtggacggtggacaggctgggtggatggtggacactgcgatgaggacggtggacactgcgatgaggacagtggacaggtggtgtggacggtggacactgcagtgtggatggtggacaggtggtgtggacggtggacaggcagtgtggacggtggacactgtgatgcagacggtggacaggcggtgtggacggtggacaccgtgatgcggacggtggacaggcggtgtggacggtggacaccgtgatgaggacggtggacaggcggtgtggacggtggacactgtgatgcggacggtggacaggcggtgtggacggtggacactgtgatgcggacggtggacaggcggtgtggacggtggacactgtgatgcggacggtggacaggcggtgtggacggtggacactgtgatgcggacggtggacaggcggtgtggatggtggacaggcggtgtggacggtggacaggctgggtggatggtggacactgcgatgaggacggtggacactgcgatgaggacagtggacaggtggtgtggacggtggacactgcagtgtgaatggtggacaggtggtgtggacagtggacactgcagtgtggatggtggacaggtggtgtggacggtggacaggcagtgtggacggtggacactgtgatgcggacggtggacaggcagtgtggatggtggacaggcggtgtggacggtggacaggctgggtggatggtggacactgcgatgaggacggtggacactgcgatgaggacagtggacaggtggtgtagacagtggacactgcagtgtggatggtggacaggtggtgtggacggtggacaggcagtgtggacggtggacactgtgatgcggacggtggacaggcagtgtggacggtggacactgtgatgcggacggtggacaggcagtgtggacggtggacactgcagtgcggatggtggacaggtggtgtggatggtggacaggcggtgtggacggtggacaggctgggtggatggtggacactgcaatgaggacggtggacactgcgatgaggacagtggacaggtggtgtggacggtggacactgcagtgtggactgtggacactgtgatgcggacggtggacaggcggtgtggacggtggacactgtgatgcggacggtggacaggcggtgtggacggtggacactgcagtgtggatggtggacaggtggtgtggacggtggacaggcagtgtggacggtggacactgtgatgcggacggtggacaggcggtgtggacggtggacactgtgatgcggacggtggacaggcggtgtggacggtggacactgtgatgcggacggtggacaggcggtgtggacggtggacactgagatgcggacggtggacaggcggtgtggacggtggacactgtgatgcggacggtggacaggcggtgtggacggtggacactgtgatgcggacggtggacaggcggtgtggacggtggacactgtgatgcggacggtgcccccacggtctgtgaggcaggcaggggattgaggacagtgcctcctggtttcctctcaggtcacagtcgctcctggtgagagagaaaaacttaccgtaaaatctgaacatccaactgcgcagtctaggctgccgtcggctgcaccagacacacattccagagaggtgtgcaccagtggaagtcaccttgccaggagcatgagatagtatttcatgctttactgattgactgtttctgtctttctcccacaaaagaagccatcgccgagacgtggttgcgtactgggaatgggtctgtgccctgagctcgccctgcaaggctctggggaagggccttgacatctgcttggctctggcaggtcccatgacaccgtggccctgctgcttcccccccaacaccagggttgtgtctggctcggaggcaaagcagtcccatagctggcagggccgcagccagcacggcccaggaggggcccctttgtgttccactgtgtcccgtgtttacacttgtttgtctgcaagactggaagagcaagatttaagtctgatgccaggtagatattatctggcagcctccgctgggaatttccaggtacaaacacctctgtcccatatcttcaggctgttagtgacctgggtcctcaggtgtggaaaaattgagcgtttaagccattctcaggtcatcagcgtgagtcctgcatcttttagagagaaattgtgtggatgttcaagactgcaaatgtggctatatgatgagagcgttggccagaaatcgtgtctgctccgtggtcagtggtcagtgtcccccaggcacagtggcctggcagccgctctgtagcagagaccaccagcctgtcagtccgtacagctttccctggagggtcttgctggccccatgctcccggctggtgctggctccatgctcctagctggtgctgaccccatgctccgagctgatgctggcctagtgctcccagctggtgctggccccgtgctcctggctggtgctggccccatgctcctagctggtgctgaccccatgctccgagctgacgctggcctagtgctcccagctggtactggccccatgctccccccgtgctcccagccagtgctggcctggtggctgcaggtgctgcagtgcgtccagagccatctggaacctgctgggtggggggatgggtgtgggggtcgaccctgctgttgccatcctgcctcatttgtgtccgtctaatggcgaggccagggttgtggcacagacccccgagggtcctgtgtgtgcggaggcagaggcccattccatggccaggttttcctcctgggccacaagttactgcacctgcaacaggtgcggggcaggggtcgcctgaacattttccctaatgtgggtgggactcagaccaaagtgtatttatccgaggagccaggaccaagccctttcccactgctcccctgcctcccctctgcccaggtctctctctttgtccctccctctctctgtctctcagtccctctctctgaacctcttatatcacactttcaaaattgatggtgaatcactcaacacacagcttttatgcgctgagaaacaaaggcctccacgtattggaaactgaaaagcctttttccagccacgtgacgccactcccgtaggtgcctgtggatgtgccagctccgtgtgggatcgggtgggcgcttgcagggtgaggcagcttcctgggactgacacgtgccgtctgctctttccgtgcagatgaaatcatgcaccaggacatcgtcccgctctgtgctgccgacatccaggaccagctaaagaagcgctttgcttacctgtccggtgagttccagaagctgggatggggtggagagggaggggtctggggccgggtgtgggccgagcagcccccgtggcctggcccaggctggagctgggaagggtcatgcgaggggctgtgtattcactgccttgggtctgacctgtgacctggctctccccatctctgtgaagtgggcagctccatgccagttggcacatggccactgggaggaggtgggtggaggagggtcagggtccccagggggatgtggcctgggcacccctgacagcagcctccagggacagatggagtggtgtgtgggtggccgagcccatgggcctcagtgaaccccagttcctgctgcatctgggcacctcccaggccacgcctctgtccactgtggcctccagccctgcgtctggcacacctgtggaggtggtgcctgcagccatggggacataatgaggctcccagcacccctgtgtgggtacagcaagggcacctgcagtggccccgagctatgtagatgccgttcttatgtgaacaaatctgcccaacaggacccgtcagaaaaaacaccatgcacatgcatgcccaccctgggccatcagggtgccccgatgctgaggagggtgccccgatgccgaggagggtgccccgatgctgaggagggtgccccgatgccgaggacgcggtgctcttgggagctcagcctctgcccctctgcattcccgtcagcatcccggcccccaatccatggctggcacggtggggcctccatcccgcacctgcacctacagagccagcctgcaccccaggccgggccttggggtctgagggaggctgactgcgaggtgcagctggtgagttttatgagaccaaaatcgaagagacagccagcaacatgatggccagaggagaagtgctgtgcagtgacttggtccctgcttcccatggccaagtggcccaggaggaggaaggagagaaagcagggggtctctggagaactgaaaactcccagaggacaagggctccaatccccctgtgtcggggaccaggcgtggtgatggctcaagagaggcgccgtggtttctgccggttcctcctgcgtccccagcctctccccgcccctttcacaaccccaaagaggctcacagctttgccaccaggagggccccgacctgggcctccagccttgaccttcctccagttgccaggcagtgcccccaccccagcggtgcctgggagggcagagtcccaggacggccccagccacccaccttttctcgatcgttcctcagacgccagcccaggagctctgggggggattttgcagatgaatttaaggccccaaatcagctaactttaagatcttccttggtgggcttgacccactcagctaagcccttagaagagatggggctcttcctggcatgagggatcccaggtgcaagaaggatttgacacaagggggttctctgtgtggccccgaaggaggcagaggccgcctgaccaggacaagagccgccccacgggcagccgccaggaacccggggcctcaacactgcagctgggggcacagctctgccaagcccctgggggagctggagagactgggctcaggatcacagcccggcaacccctccacgtgggcccagagaccctgagcagagacccgcaagctgataagtgcctgagcgtcaatggtcttgggaaccacaccaaagcctccgtcggctcctctccctcctggaatataagatggagtcccctgtggtactgctgcccccgcgtcatatgctgcccccgcgtcgtatcctgcccaccccctggaggcaggctgcctccccatccccctgcctcccgccaacctcggggcctttgcacagccggccctctccatgcagcgaatttcttccgcggggcttgtggctggcccggcccctcaggccttgctcagaggcacgccctcgtacatgccctctccctcctcgcctgcgctctgctccgcccccttcgttacaccacctcacgtcctcccgtgtgtggcgtgggtccctcctgagggctgggtttgttcacagctgcctcccggcttctagaggtgcacccagcctcagagccatgtactgagggctcagccatgggcccatctggggtgggaccctggcacaccacgctgttctcaggatccaggtcgtagcagcagtaccacgtctgagaaggatcagtgtcggctggcgcttctcctgcagatgtgcgcggatttggaggaagcctgtggcagcctcgggtgtgtgcgttgccaatcgccccgtcccctcctcaccacgtccagcactgctgtgtcctgaggctgcgcctgcactccgggttcctgccatgaagcccccttttgtgtcctcatgacaaaggccatgcactgggggaccgaaacaactggggctcgtctctcaggttccgtggggctgtgccccttccggaggctcctcctgctttggggacgcaggtgttccttggtgtcccttggcatcttcatgcagccgcctcacctgtacgtcggtgtctcctcttctgcctcaaagcccctctgcctttctcccgggacacccgtcacgagatttagggcccaccgtataatccattatggtctcaccctgaaaactttgttacctctgctgcaaagacttctccaaacaaagtcatgtttacaggctcctgggacagggagtggacgtgcctttcaggggccgccttggactcagggtaaatctggctcagaggtttgctgtcttgacagctgccctcaagggggctcccctcccgccccagcatcacccatgggactcgctctccctgtctcgctccactcgaaggaaacacagactcccccgcccgccactcctgcacactgaccaccatggggctggggtccagctgggtgaggcccctcattgtgactggagcccacaggtcgacaccccagcctgttccgtggacttttgcttaattccctggtctttggatgcctggaatggcttccgtgaagtgccagagcaaaaaactaaagatgtcaggaaggaatggctccgaattttccttttcaagaggagactgcgtttctttccacttgccctgctgatttcccctccctgcgacgttcgtgccagccctgtgctgtctgccgcggagccatggctgccactgtgacatgtgcggtcccgtcttctccctccattgtctgtagacgcacaggtgccacgcagaaccctacagctctgtccagatcctggatccagatgaggcagcttttgaaaggcggccaagtgagggatgcgtaaacctcgggggctccggactcctgtacgttgccgcccaaagtcaggacgagctgcggaagtcacacctggactctgtgtctgtcatccgcagacagcagctccccattcagcctgtgtccctcgtaatccacaccctctactcacagtgacatctgccccaaaagcgcttcgcttaaccctgaagctacgagacctgccaccctactgtcccctctagttttctgacatttgaggaacaaggaattgggtgtaaaatcaggaaatatcctacatgtaaattcttgattattcttgtccttccgggcagagctgcctcctgagtcatccgtttgactctttcttactgaaggctgagggttggggggtgcatgggtgctccaaacccagaggcaatggcgcgtcccctggcatggcagtcggagcaggccccgaggaggtcgtggtctcagaactcagtccttgtgtcatcctagaaaagatacttcaacttgctgaccgtcagcaagagctaaaaacagggcgggagaatttaccactgaggaacttatgatctgaagtgaaaaacgcagagaacagacttgccaccggtgaaaaccacaaagctgaaatggaggccctgcccggaacgcagaggccaccgccactgtgcgtctcactccctgcaatggacggcggcccccctcccactgcccaggcggctcttgggaatttcgttttgcttttacgggaatgtggcatggtcagcggtggccatcagccatccaggaacctggatttgacaggattgctccatcccatgtccaggcagcctcaggtgtgtggagacagggcagacttaggagttcctcccctggcctgtgctctcctcccgggaagaacgctggagaccttcgtctcttctcctttcctcaccttccccaagcgctcgctgcacaagccccctcctgccttgccccttctcccaccccatttcggttttggtcccagcttacatctcgtcctaaggattaagtgtttgtgcagctgagccgcagttctcaggtgagctgcagggctccagcatggcacctgcctgggcagtcctgagagagggattcgaagtggggaaggaccccggagtctccctggcacgtggtctgaggctccagccaccagacccgaagctcagtctacactcaccaaggcccgacggctgctccaacctgggaggaccgatccgatcctgcgctccctgaggccgatggctttttgacacccaggcttcagccacagacagacagacgttccctgcccgtgggggtttgcccttgctggagagaaacagaaatggacagaaggtcactggggtggccctgggtgttctgcggagaatcaaagtcatgagacggagacaggaatcccgttaggtttgggcagagtcgcacgtgctcctttctggacctgcttcaaggaatccgatggtttcacgacatccaaccagttgctataggataaatgtttgtgtccctccaaactcagatgttgaaaccctaaccccagaggtgatgtttggggaggtgaggcctttgggaggagattaggtcatgaaggtggagctcccaggtgggatcagagcctttataaggggctgaagagaccagatctccttccgcagcatggccatgcctcaaggagacctctgaatggggaagccgccgtcaccagacaccaagtctatgggcaccttcatcttggacttacctggccagagctgtgagataaatttctgttgtttgggcctcccggcctatggtggtttgttacggccgcccagacagaccaacaaacagcctgtgtgaaaatgcgagccataaacgagtggtgttgacaaaggcatcctgtccaggtaggagttccgtgtggctaagtagtgtctagtttcagaatgtgatgccttcttgatgtcatctccacactggcaggaggaggtttttatttagttcttattttaagatttttctacccgacagttaacttaggatacagatgtcatagtaaattaaccactggaatgctttcattcctaagcagctcatgtgggtgagtttctaaagccgtgtttgggccgaggcatcacacaagagggtgtccctaagatgcatcacgtccgtggagaaaacaaagcaggacacacgtgtgagtcgtcacacccttggtcacccggcttggccgtcacacatgcctcctgcccaggacgcgtgtgcgtgtgtgtatctacctgtgtgtctcaactcaggctgcttgctgtgacaaagtcccctagactgagtggtttaagccacagtttatttctcttggttctggggcaggaagtcccggatgaaggcaccggcagatgtgctgcctggtgagggctcacttcctgatttacagactgcagccttctcgctgtcctcatgtggccaggcgagcagagcaagcccacagaatcccattcacgggagccccactcccacggcctcctcccctcccacaagccccacctcccagcactgtccccgtgggggtcagcatttcaacacatgaattcaggggaagacagacatccagtccataacagtgtatatgtgtagctgtgtgtatgtgtagatgtgtgtatgtatagtgtgtgcgcgtgtgaatgtgtagctatgtatgtttgcatgtatgtgtagtgtgtatatgtgtgtatgtgtagatgtgtgtatgtgtagatgtgtgtatgtgtgtgtatgtgtagtgtgtatgcatgtgcatgtgtagctgtgtatgtgtatatgtgtgtacttgtagatgtgtatgtgtgtgtatgtgtagctgtgtatctgtatggtagctgtgtatgtgcgtgtagctgtgtgtgtatatccatgtgtgtatatataggtgtgtatgtttgtacatatatgtacatatacatacctacacatccacatgcatatgtgtgcagctgtgtatacatgtgtgtgtaggtgtgtgtctagctgtatgtgcagctatgtatctgtgtatagctgtgtacatatgtgtgtgtttataagtagctgtgtgtgtaactgtatgtgtgtatatgtacatgtatgtgtgtataggtagctgtgtgtagctgtgtgtgtattaaactgagtgtgtatctcacactaaagcagatcccgtaggaaccacacttctttctggtgatggggatgagagggagttgcatctgccttctgcccctagcgagtggatgtaggcccagttgcttgggtgcgagagttcacatgcaggtgtgacaggtctcagccaggacagtggtttttggacgtgggtggggaccggaggctgcccctggtgctgtgtggacagggtgctgttctgaaccacagaggagcttcggagccctctgtcctctgcggcgttcagtccgcctccagttactaggccgggtgtagacacagaagtagagcctgttcttggtgccattggccccgggtcctggcactgcccaccttggtggggagggtttctccagagaggggctgtgcccccagctccgcgtccagcggtgttttgctgcctcataacctgcaggtactgggagctttggcgcctgcttttcagtctcagtggacagactgggatttccactcctgacttgggaagaaagaacagggtctttgctttgcattgaggctgtggtggagcacagagagttcagagatacccagggtagcagcagcctgagaccagcaccagctaccaactgaacgaggctgtgcggcccaggccaggcccccgtgcgatttcagctccgggtcacctggcccccatcctctcccctgggcagctggaggctccaggccttcctgtggctagctcctgccccaaggctgccctgctgactgcaccctcgaccctgtggctcaggctggcctctgggggtccccggtctctgtggttccagtgaggcagcagctcccagatgccacctccacactgtgggtgggccagccagtgctgagagggagccactctccacctctgtgtccaccatccactccaagctcccaggctgcctccacgttgtgtccaccgtccactccaagctcccaggctgcctccacgtttgggcatgaggggatcttgttgcatccgctcctcttcctagctgggccctccacagccagtgtaccccaaggagcagcttctccctcccacccacccccgccggccaggggtcctcatgccgtggcccatgcccatttgcacagggacgcagggggtctcacacacaggcagggtccgcccccagctgccgtcggcgtcactccacacacataggcttctgggcggtgctggaagcttctggcccctgaacgttccccccaggccccgtttcagggaaaggaaaggcaggcgcaggctgcggccgtttccacaatccacctcgtagctggggcgtgccgcttgcctcggcttgtcccggcagaacactcttacctttaatggcgactgaaaagttgccacgagttcctgatcattgtggtaggtgctgcgtgaagctgagacgtgcgtgagccacatcccagggggctttgagcccccaccgcggcggcggctgaggggaggcttgtcgtactcgcacaggaggacacagggctgcagtgttcactccagggcctcttatcattgggatctgaggaattttccgagaggaagtgcgaattaacaatgatgaaaggtttgtgagtgagtgacaggcacgttctattgagcactgcatggggcattatgtgccaccagagacgggggcagaggtcaagagccctcgagggctgggagagttcggaggatagaagtcatcagagcacaatgaagccagaccctgcagccgccttccccttcgggggcttccttagaatgcagcattgcggggactgagctgtcccaggtgaaggggggccgtcacggtgtgtggacgcccctcggctcagccctctaagagactcggcagccaggatgggctcaaggcatgagccctcaaaggaggttaggaaggagcgagggagaaaagatatgcttgtgtgacgtcctggccgaagtgagaacaattgtatcagataatgagtcatgtcccattgaggggtgccgacaaggactcgggaggaggccacggagccctgtactgaggagacgcccacagggagcctcgggggcccagcgtcccgggatcactggatggtaaagccgccctgcctggcgtggctgggcttggccaagacccagaagcagaagttccggaagctggagacagtggctgtggggggcgcaaggcggcgggggactgtcgctgttacgagacaaagctgcagttgtcggaggctgtgtgcaccctgggtcttctcagtgaggacgtggatgaggggcggcgaacccaccattatctgttctccataaaaagctaccctaaacttagttagcttgaaaagccctattttacagatttattcttcatttagtggctcagaagttccaaaagggctcagccaggtggttcttcactccacgcacggggcactgactgtgtcctctgctcagctgtgtcctcatgggggctgggctggaaggtcctgggggctgcagtcccgcacctccacctccctgccctttcacaaagtccaccctcaaccctgggtactggcctcctcagagcaggtggatgcagggtcgtgggaccacctgcccaatgactacagggcatgagagggcagctgcagtgttctgagtcccaagctcacttccgctgagtcctgtgggcaaaacagatcgcaaggccagacccaggctcgggggagggaaatggactccgtccggccaaggcagtgtggcagggtcagtggccggctccagcaggcagacctggagcccagcctgtgtgactccaaagtcagtgttcgaatggagctctttggaattgaattgcttaaaaggcgccaatgtcggagaagctagacgatacccacaaacagtacagttaggcaggttattagtgcacatgcatatatggaatattatgcaatatttaaaataatggttacattgtttaaaagcatggaagcggtttgttctcagtgtcaggaaggaggcaggagacaagcttctctatgcagtatcacctcaacaaggttaaaaaagcccatagaaaaaggcttggaaagaagcatgttgaattgtcacggtagctgtcccatggtggccaaaataacgagtgattgtctaaattcacatcacttttgtgtactttccaaatattttcttcaagcagcacacatttctttcaaataaaaattatgcaacgatgaagaacatgcctcagttttaactgaaatactgggtgctgatgaaaacgggccgacatctgtggaacccccgggggcatggagccctcggctaagggtctgcctctggtctctccccaggtgggcgggggcaggacggaagcccggttatcaccttccctgactacccggccttcagcgagattccggacaaggagttccagaatgtcatgacctacctcaccagcatccccaggtacgtgcacccagagcccggcagacattgtggtttggggcagagtccctgtgagatttcaccagggtggggtccctgcaactatgggatgaggcagagtccctgtgagatttccctgtcatggggtccccgtgactgtgggtcggggcagagtccctgtgagatttccccatcatgcggtccccgtgactgtgggtcagggcagagtctctgtgaggtttcatcatggtggggtccccgtgactgtgggttggggcagaatctctgtgaggtttcatcatggtggggtccccgtgactgtgggtcggggcagagtccctgtgagatttcaccagggtggggtccctgcaactatgggatgaggcagagtccctgtgagatttccccatcatgcggtccccgtgactgtgggtcagggcagagtccctgtgaggtttccccattgtggggtccccgtgactgtgggtcggggcagagtccctgtgagatttccccgtcatggggtccccgtgactgtgggtcagggcagagtctccgtgaggtttcatcatggtggggtccccgtgactgtgggtcggggcagagtctctgtgaggtttcgtcatggtggggtccccgtgactgtgggtcggggcagagtctctgtgaggtttcatcatggtggggtccccgtgactgtgggtcggggcagagtctctgtgaggtttcatcatggtggggtccccgtgactgtgggtcggggcagagtctctgtgaggtttcatcatcgtggggtccccgtgactgtgggttggggcagagtctctgggaggtttcatcatggtggggtccccgtgactgtgggtcggggcagagtccctgtgaggtttccccattgtggggtccctgcaactatgggatgaggcagagtccctgtgagatttccctgtcatggggtccccgtgactgtgggtcggggcagagtccctgtgagatttcaccagggtggggtccctgcaactatgggatgaggcagagtccctgtgagatttccctgtcatggggtccccgtgactgtgggtcggggcagagtctctgtgaggtttcatcatggtggggtccccgtgactgtgggtcggggcagagtccctgtgaggtttccccattgtggggtccccgtgactgtgggtcggggcagagtccctgtgagatttccccgtcatggggtccccgtgactgtgggtcggggcagagtctccgtgaggtttcatcatggtggggtccccgtgactgtgggtcggggcagagtccctgtgagatttccccatcatgcggtccccgtgactgtgggtcggggcagagtctctgtgaggtttcatcatggtggggtccccgtgactgtgggtcggggcagagtctctgtgaggttccaccatggtggggtccccgtgactgtgggtcggggcagagtctctgtgaggttccaccaggctggggtccccgtgactgtgggtcggggcagagtctctgtgaggttccaccatggtggggtccccgtgactgcaggatgaattagggtctctgggagccatcattgagttccccgtggctttgctgaggggttagagctttgtcagcatcatggttccgaggagctcaggagtctgcctcagatctgatctggggtccgaatccagctttttcgctcctgagctgccgttttttcctggagctcggaggcccacctggaggcccagttgctcagcagtcgggatctgacttagcctgagcgctgctgtgctccctcgtataccatcactgcgcatgcctgttcgatcagcagagttctgcggtgcgagggcttctgtgttcttaatgccgaggagcccatctgcacgggacctgatgctcatgggagcagagcccgtccacgtggcctctctgtgtcgtggtcaggccctgggggcgtggccgcctcctgccctttccaggaaagaactgaccccagaggtaccagaaaatccagttaacaaaaatggttccctcaggctgcagttttttgttttgttccagacagagctgggtccctgtcctctgaaaaggtagggagcccagttctgtgtctccccagcggcgggcaggagagcagcatcaggccggtgagctgcaggctgacttgggaggggtgccgcgggggtctctcatctgatgtgctcgtcccagcctccaggaagatgctgagaatgtcagcctcacaccagacagtgtagttgctgcttccatttggggtatagtgaacacacaccaagtaaaaacagaaatatccttaaatatggcatctgtatcccgcacattacataaggtggcaaaacacagaggagatgtttaaccatcagcgtgaaagtgcagccgtggccattaccgtgaaggttcttcattcttcagtctttaaagacaacagcgcactgggcctggtaactgagagctcagcccgtcggcctgacctggaaagcagcacattgatcccctgataaatatcacataaccaccagctggcagcagccagcctctgcagtcatgcctcaaggagagggagagcggtgggcacctctgtccacttggcgggttgaggtgggagctggaggagcagggagcctcaccggtgggcctttcgggggcaggacgtcttggtgggcagaaagaagggggctcgtgactgactatggtcaaagccctggacatggcggtgtcctggtagccccaaatcactgtgtgttgggtttgtggttttgacctcagtctcttgtctgttgtgagaatcttgcaccccctatgcgccaggctctgctggctgagctgagtgcacggaggaggggctgggtctcgggccgagcggccgagctccctgaggggctgatgggaccggcttggtggggcaaggctgcgatgctgcagacggtttccacacattcctccctggttctcagccacactgtggcaggaaggcagttattaagcccatgttatagatgaggcttaataacacggtgatggctggagaaaggggatggctgggcaggggagcgcccgaaggctcagaccacatggccgtaccccgaggacgtaggctccaggtgtgctgtggccagaggggtgtcctggggagggcggtcatctccaagcctccaggcctttgtctgtcacctgcacaggaggaagggcctgtgtcccaggggacggccggcctgacaggtacatccgccccctgatggcacctcctggcatggggctaaatgagattctgtggtgtccacactgaatgctgactggtcagactcatgctcagaaatcagggctgttgtcagtgcttgctacttggagccatgagctggggcgcctcctgtttgttgaaccttcctgtctcttttgtcttagaaacttcatggagtcccttagctacccacatccctttctcaagatttttctagaatctgcggagttccttagctacccacatcccttttcttgagatttgtctagaatctgcagcactcaaaggccacccatcaaggccataagagtgtggtaggcggcacgtgttcatgtgtgcacgcctctgtttatccgatgttctggaaccttccatggcctccttgctgctgccccacttgtctgtctgcttctcctgagatccaggaatctcagatgggtccagactcctgcaggacaagacccactcagccacctctgtagattgcgcatctgtgagtcgcacagcctggtctggctgaaggtggccggagcgcaggcccagtccccgctgtggacacgcgggccccaggttgctcagaggcagctccatggatccccactgttcacctgtgtatggaaactcaggttttctggtcacacttagataataaaaagtggaagaggcctttctatcaccaaacgctctaaatcagatcctggaaatgccagcttcattcagccatgagcagtgctgctgaccgtggagctgtttcccccaccagactcagtgtgggtgtctgagtgtgtggtgtgagtgtgtgtaatgtgagcctgtggtgtgtgtggggtgagtgtgtggtgtgtgtggcgtgtgcggggtgtgtgtggggtatgtgtggtgtgtgtgtaatgtgagcatgtggcatgtgtggggtaagtggtgtgtgtggtatgtgtggactatgtgaggcatgtgtggggtgagtgtggggtgtggtgtgtggggggtgtgtgtgagcgtgagtgtatgcgtgcattctacccacgtttcctttcttcccaggtaggtctcatcagtgtcagacccaatgctccctttctatctggaaataaaactctttgataacaaaacccaacctgtgtgaatttgggaggacgcccatgtgccctgatcagaaggacccacagaagggaagctgcgggcctgtaagagccacctgtcccctggctgtcccggcatcctagggcgcagcagccgcggcagctcccctggatttctgtgagcacggggctgcaggcgtgctgtggggaccccgtgcctccagggtgttgccattgagcatgtccttccagagagagtgaacaattcttgacacatttctaagggaaatcttcttcctaagggcatctacgggatgccttcttgagaagtgcagagtgtgttaaaaatgtgggggtcaatcatggcctctgcagataaaaccagggtccctgcaagccttgcaggtgcagcttggcagaggggaccgtcccagaggaagtctctgcatccctggcgagcaaaattgccaggctagtgacaaggaggagacctgcccactgcgccctgagggtgctgtgtccccgggaagtaccctctgcgggggaccctcttcccaaggtgggggcggggctgccctctgctggagacgcggagcattgcggctcggtcccgggacatccctgggagaccaagagagggaggggagcttggaccttttcttccaggagatggtggacgagaccctggcacaggcggttccccagcacgcagtttccagacagctgcacagccagcacattctttaagtgggaaaaaagtgaaattgaccaggcctgttctttcacatgtcaatgcaaattaaatggacaaatctctcgtgaaggctgcttttaaggggtttcaactgttacattctaaaccaagcatcacttttatcaatttagaaagaatgttgtattctaattttaactttccttctgttttcatatgcaaatgccaggtgtcccaatttaagcactacatctgactatactcatcatttttggaatattagactgaaataggtttgccccaaatggtttggggcacctgttaatataaaccaagtttttggtccttggaaagacgactcatcagggcgaagggggtgagctcgtgctttgctgactcaggtgtctgccgacgcccggtgtggactctcaggtgtccgctgacgcaggtgtggaccctcgggtgtccactgatgcaggtgtgggccctcgggtgtccgccgacgcccggtgtggaccctcaggtgtctgccgacgcccggtgtggactctcaggtgtccgctgacgcaggtgtgggccctcgggtgtccgccgacgcagatgtgggccctcgggtgtccgccgacgcccggtgtggactctcaggtgtccgctgacgcaggtgtgggccctcgggtgtccgccgacgcccggtgtggactctcaggtgtccgctgatgcaggtgtgggccctcgggtgtccaccgacgcagatgtgggccctcgggtgtccgccgacgcaggtgtggactctcaggtgtccgctgatgcaggtgtgggccctcgggtgtctgccgacacaggtgtgggccctcgttcgtcagagggcaggttcggatctctgaaaaccctatagcccttcctactcctaatggagctccatttaaccaacatcggccaggccttgataggagccaaggtctcagagaggcgatagagaccagcgacaagcagattccagaccctgtatggcccccttagaaccacatggccggggaggagatgcacaggtagacggtcagacctgtgtgtccaggcactgcttgctgagaagtctcagtggtcagcacacactgggaacacaacagcaaataaacagagaaaattgtggcgctgagacaatatgtcagctatggagggcgtacagggcagcagggctgtgggaaaacaatgtgagaaagaaagagagacagagagacagagacagacagatacagacagagagacagagacagacagatacagacagagacagagacagagagagacagagacagagagtgacagagagacagacagagacagagagagacagagagaagagacagagagtgacagacagagacagagagacagagacagacagagacagagacagagagagacagagagaagagacagagagtgacagagatagagacagacagacagagacacggagacacagagataaagagagcacgagggaggcagagggcaggggtggcagcatcactgcagacaaggaacttaatgtaaactgggaagcattcgtcacagagatcccaggagggcgccagcggcatctttgggggcagcgaacgcaccagggggcaggacagagtgccggggagtcgggggctgtagggacagagtctgggaggtgagacagggtctgtggagccttttctgaggagctgtgttttctgtgaagtgggtgccaaagagttcatgagctgccagaatgcagggtggagggagaatgcggggtggagggaggagctgggagatggggaggagggcggcggccctcagagaagggacgaggtgggaagcctggagcttgctggaggagcagtgtggaaggaattcactgaagctgatgatgacgcttactttccatgggcctggctcaaagctcccagctccttgggaggtagggactccatctaccagccagcttgccgggacaggggtcacattcagcccataagaggcatgtacacatacagatgcacacacgcacctacacaggcttgcacatgccacacacacacacacacacacacagatgcacgcagacacgcaggcactcatgcacttacatacacagatgtgcatgtgtataaccacacacgtgcgcacacacacacatgcaagtgcatgcatacccccccacagacctgcacatgtacacaccacatgcatgcacagtttgtgtggtgtatggggagggtgcatgtgggacgcaacagaaacacgaatgtaatcattaggcttccagtcaagaggagagtcctcctatctcactgattctaagataagcacctggagccaactcggtttgtcgtccccctgcggtgacctgagcaccctgtcctgctgtctgagctggagggcagctggaccccagcccttggaagagccccacttctcgctgtgggtttgatttcctattgaactttgaattggcttttgaatataaggacaggaagtgtctgtgagcgtgtgtgagcgtgctaaacaatttaatacgtgtgcattaaaaagtgaagcttccacttcacctcctgcttccctcccccacagctaactgtggagctgcactggggtgacacccaggctgttcatccacgtgtggtgggacagcacaggacatgccgcctcgcagcttgctgcttctgttcagcggtgtgtcgtggcgcccttctaccttggcgccatttgctgctgcctttcattttatatatttttttttcatgttttgagacagggtcttgctctgtcacccagactggagtgcagtggcaggatctcagctcactgccacctcaacctcctgggcccaaggtgatcctcctgcctcagtctcctgagtagctgggactgcaggcatgagccaccacacccggctaatttgggtattttctgtagaaatggagtctcaccatgttacccaggctgatctagaattcttgggttcgagtgatccacccaccttggcctccaaagtgctgggattacagatgtgagccatcgtgcccgcctgtgccttccttttaaaggcttcctggcccctgtgatgtaagcggacctggtgtgctcacttgggctggcccccgtgacgtgagtggaccccgtgatgtgagtggaccctgtgatgtgagtggcccccgtgatgtgagtggcccccgtgacattagtggaccccgtggcgtgagtggcccccatgacgtgagtggcccctgtgacattagtggaccccgtggcatgagtggctgccatgacgtgagtggcccccgtgatgtgagtggcccccgtgacattagtggaccccgtggcgtgagtggcccccatgacgtgagtggaccccgtgacgtgagtggcccccgtgacatgagtggcccccgtgacgtgagtggcccccgtgacattagtggaccccgtggcgtgagtggcccctgtgacattagtggaccccgtggcgtgagtggcccctgtggcgtgagtggcccccgtgacattagtggaccccgtggcgtgagtggcccccgtgacgtgagtggcccccgtgatgtgagtggaccccgtggcgtgagtggcccccatgatgtgagtggcccccgtgatgtgagtggcccccgtggcgtgagtgaccccgtgtgctcacttgggcctgttcgcgggcatttcgtggtccccactgtttccctgttggggtcactgctgtaaagggtcgccccgccatggtgttctgtctgtgagattgtgccctgtttctggcagttctcaaatgctccagctgggtgatttcccccccccaccccaacggagttggcagtttcagggctacccttgtctgccatctctggctggcctgaggctgtgctggccccggtcgccctccatggtctgaagccctgagtggaagctctgccacccacagccagcctcgttaggaggaaccaggagacatcacgcggcccaggtgtctgtgcgctgtgctgggtgggaagccacctctcaggtgtgtttcccgtctccacatcagcattttgttcatggagtctgctgcttctgagcactggggacaagtcgcggaggccctgccattccttcctccgggttctgcacgcaccgcggtgaccacctccccccgaggtcctctccccgcaccttcccaaaacgtgttccccaggtccttttctgttactgctgttgaattcaacagctactgaccacctgtggccatttaaatgtaaaatgaaagcaaaataaaattaaaaatccagcccatggcaggcagggctgcctctttttttttttttttttttggagatgcgtctggctctgtcgcccaggctggagtgcggtggcacgatcttggctcactgcagcctcaaccttcccagctcaggtgatcctcccacctcagcctcccgagtagctgggatgacaggcgcatgccaccacgcccggctaatttttgtattttttgtagagatggggtttcaccatgttgcccaggttggtcttgaactcctgggctcaaatgatccacctgcctcagcttcccaaagtgctgggattactggcgtgagccaccatgcccggccaggcagcctcattttcattcacacatgaccaatggctgcttattgggctgcacgatggttatgctggctccgtcctggaggagtgagtgccctcaccctcaccctcaccctcgccctggtctcaccctcgccctcaccttctccctcgccctggtctcaccctcgccctcaccctggtctcaccctcgccctggtctcacccacgccctcgcccttgccctggtctcaccctcaccctggtctcaccctcaccctggtctcacccgcgcccttgcccttgccctggtctcaccggcatgagcagaaagacaaggcccggggttgcagtgtctgtgctcagggtccagacacagctcagaaccgaccttccttggggagtgacagtccccggaggttaggggctgctgtggccaaagagccacagatcggaggtgaggaaggtctgcccgaggtgaggaaggtctgcccgaggtgaggaaggtctgcccgaggcaaggcaggcccgcagtcccgggcggtggcatcagggtgagcgccctgatagcaagggacctatggcgcccacaccggagggcgggaaaaggaggaagagcatggcccccgtgaagcccctcgggaggaagggttcctgtccacgttcagcacccccgtgcagacctcaccattcccgacgggaacacttgtgatattcacttccaaccacacgagggtgcagctgggcaaccgcagcttttggaaaaatgttgaaactggggcggcttctctgggtgactctgacgctctcattgcttcacgtttaatttttgtgtcctgctgtaactaccatgtagtgcacttatgaatcgtgcatattttactctaaggcctgtctgtaaaccctaataaatgaccctactcaggtaagacgtcctgacagtgaggtttttaatatttacaagccacagaattatttcctgcagccacagagacttccttggcgggaaaccaggtcctctgacctcacccggctctgcagtctgttttgccgttttccgcctcaaaccccctctgcgatgtgcagctctgggtgtctgatccctcaggggtcctgtctcccctcctctggccccctccctggctccttcgcctgctgcctttttcttccatgaggatgcggttcccgtgtcccccaggacagcttcgtggccggccgcctccatggattcgggtgggcacaggtcctgcagggagctcctgtgttatctgccctccccgcgaagctccttggaggatggagattttaaggtcttactgtggtgtgagcgatcagagaccccagtgtttaccaggtaggctctgggctcagaccccagcgccccacttgttagctgtttgaccctggatatgtcattcacttctgcgttcctcagtttctgcacgtttaaaatggcagaggcccctttggtagtgagtctgtgtgacaggcgatggggccttcctctctggtacagcaggggcctaagggatgtttgacctcagcaggtagagtatcatctccgtggtacagcaggggcctgagggatgtttggcctcagcaggtggaggatggctgcaggtcaggattttgcatcacaaacaacactgctgcagtcacattagtggattttgttattatagacaacactcgtgtctataattccaaggacccattctccatgcccagaggcacctcagtcccacagaccgcagcctgattctgagttcgcagttggccagtgttgcagaagctcacagaggagtctttggaaatgagaatgacgccaccattctcttttaattgtgtcataggtcttccttccttttatacataagttaactgaggctggtttgctttccacagccagagttctaagacaattttaagtaacacttttctttcgctatttctttatgaatgtgttgggttttagggatcacagatgtgcttgggcaaccaaggctgcctgtgtctctgtgctctggggggcttttcctacgagctttgcgtgagatgccagctgcccacaggcaactgggcacagagagcaggagaataaagcaggccagggcatcaggtggggctgattccatggagggcaacggcagtggtgggggcaagtgcggggtgggtgagtggcagcagccacccacagaaggacgcgctgtcccggccccgcatccccaggagtgcgtgtgtcgcaggcgaccctgtcctctcacccaggagccctctgagctcgcgcctttcttcaggtgtctgcgatatcatgctccccttgtgttcctcctgcctcctggctgctgccagtgggtggccccccaactcctccaccagaccctgactctcagaggactccaagcctctatttgtgttattcctatccagtccatggggttcagataccaagtggaacttttaacaaccatgaattcctaggcctcactctcaaatcatcacatcagaatatccaggagtggcccgagaagacctgcgttgtagcaagctcccggatgtttctcttgcatccatctggcactggtctgcacactggtgtttggaacccccagacttgaacttagtgccgtgcggtccagcggccctcctgtccatctcagtgcagagaggggctgggggaggtgcaagcgtgtcatcctagaagaattcctctcgactaacagcctgccgtgttcttggcatctgtgcacagtggagccccacaagctggctgaacccttggcttgcgtcctaagctctgtgtgctgttaggatgatgataacgaccacgatagaaagcaccttgctgagcccctaggagtagaaggtggagggcaggccagggcagagttgagctagacagagtgaagaacacaagttctggggaagcagggaattgtaaccaaagatgaaaccacccctgcccagcggcaccatttgtagggaccttggagagttggttgaacatctgcagagcatggggtcggagactcaggtcagactaaactggttcagagccaggatacccctttcgacctgggttacatttgtcatcattcatgtaaatgtttctgttagatggaaacaggttcaaaacccactacctacttccattctggctctaatagagtatcttgtagccaactgatatttccacaaagagcaactgtaaaacctgggtaaaattttgtttaaaaatatgtttgagggattgagaggctgcagaggcagccaggacttggggagccaggttctggaattttacagaggtgagccccactttctgcatttcatggtgaggtattgaacgctttgccgctgaggtcaggaacactgttctcatttctattcaggattgtgcttggaggtaccaggcagacaacaagacaagaaaagaaaagtcttaaggattgaaacagtaagaaacacaggtatcattcattatttgtagacaatgtggttgtgtatgaagaaaatccaaattaagtaacagtcagactcttaagctgagtaagtaatttagcaagatcaatgggcaggggtcaatatactaaacttaattgtattttagtatttttatatatatcaatgatgtacaattggaaaatgaaatttatagatatcacttataatcacatcaaaattgagtacataggaataaaatcatatctaataaaagacgtgcaagacttctaagcagaaaactgcaaaatgttattgaaagaaattaaaggggccaggcacagtggctcatgcctataatcccagcactttgggaggccgaggtgggtggatcacgaggtcaggagatcgagatcatcctggctaacatggtgaaaccctgtctctactaaaaatacaaaaaattagcagggtgtggtggtgggcacctgtagtcccagctactcgggaggctgaggcaggagaatggcctgaacccggaaggcggagcttgcagtgagctgatatcgcgccactgcactccagcctgggtgacagagcgagcctccatctcaaaaaaaaaaaaaaaaagaaagaaattaaagtagcatgaataaatggaagaatattttagttcacagattagaagacaattagtattataacaatgttaattctctctaaataaacatatagatcgaatgcagttcccaaataaaattccagcaggtttttctttatttaggtgtgaacattggcaggctgcctttacattttatatgaaaatgcaaggggtgaggaatagtcacccaactttgaagaaaaaagttgaaagctgatactgccaaatattaagacattattaaagtgacagtgattaacacagatggtgtaaacagaagagcagcagcacagaatattgaatccagacagaccacacatctgcagtctcttgatttatttattgatttatttatttatttttgaggcggagtctcgctgtgtcacccaggctggagtgcaatggtgctatctcggctcactgcaagcgccgcctcccgggttcacgccattctcctgccttagcctcccgcatagctgggactacaggcgcccgccaccacgccctgctgattttttttgtatttttagtagagacggggtttcaccgtgttagcctggatggtctcgatctcctgacctcatgatccgccctcctcagcctcccaaagtgctaggattataggcgtgagccaccgcgcccggccattgcagtctcttgatttatttcttaagtgatactgtagcacagagggggatggacgtcctcagtaagaggagtggatgtgattggctgtctgtgtgggaaattatgaatgctgatacctgcctcacaccatatacaaaagttaattccaaatagatcacaggtgtaaatgtgaactctaaagtaatatagtctctattctcgacaaacataggaaaatgcctatttcagagtaagaaaagatttcttacgcaaggtttaaaaagcagttatcaaaaaagcaattatcagaaaggaaaaggtcagtaaattgggctacattaaagttaagttactcttttcatcaaaatgaaccatgaagagatcgacacggaaagccacagtgtggaagcagatgtttgcaatatgcacatccaataagaaacttgtttctagcctatacagagaactacacaccaacaagttaaaggagaatctagtagaaaaacaaccaaaagatgtgaacaggcatatcataaaagaggatagccactagacacagaaggcttcctgcctctgggaaatgccaattaaagccatatcaggacgccactctgtatccacaagagtggctaaaattctactgacagacagtatccagtgctgacaaaaccatggagcaaccagaagtcacgtgcatttctggcaggtgtacatttgtccacatctacataattacagcaattcctaagaatatgtccaacaggagtgtgtattgtgtgcactagaagacatgtataagaagctcattgtcttatgttcagtttagccccaaactggaaacaacccaaatgtccattaagagtagaatttattaataaatcatatttcatcatatatgtataccataacccagcaacaagaatgaacagacaccctactgcaacaacatgggtgaatcccacaatgttgaaagaagccagacagcaaaaaagcacatattgtatatttttatttggacaaaattcaacggcaggcaaaactaatgtatggtgacaagagtcgggatggggcaccctggacggtgggaacggcctctcagtctgggcactcgctgccgtcactcacactctgtgcttctgcatgatgtgcattataattggacaaagtattcacataaagaatggtgtcctccaaggaaaagaacttaggtgccacctactctatcccagatgggccaaggtaaccgagtcgcactgtgcagggagggccttcctgtgtgtgtgtgtgtgtgtgtgtgtttcttttcctgaggacacagccaccctgctgtgcagggacccttctcccagactcctcttctcatcttgggtgcaggttgacgtttgagaagcaaagacaccaagggtccccttcctcccacccaggcctcacgtcccctcagcgcctcctggccacgcactgttgattcctaaggtctgctgccctctgcaagcactgctcctcccgtgtcctggcctccacctgcccctgccctgggacaaagcatcctcctcgcccccaccatgtccacgcagcagaggcagatgtccaggcactgggggaacgtggtgctggggcctccccgccccactggtagagaggagccagcctctgcttgcagaccatccctcacgctctgctcctgtccagtgagctgtggttgcacccgcaggccagtgggctgtctgcccacatgggtgggggaccatggggctcccaaggtcacgagccctgagtggtttgggtctctgtcacagaagacgcagccagttggaacattcctgaaactttatgagaccgctgggccttttttacttatttgggccaaaagtgagctcattggcctcaaactcagctgctgggaaactggccagggcagcccctccaaggccaactgttgcggagttggcagctgatggggcatctatgggctgtgtttgtgccctgggtgcgagggacatttctggggtggctgccagcttgagttattctaccccaactcctccggcaccatcaccttcatccctctggtgactctggggactgcttcctgctgaaactgggcagaagccacaccaccctctccctcagacacaggccacagatgtgggcatagatccgagctccgtgagccctgggtcctcactcctgtgagcagatccaggtcctgcctcacggttttgggcagtgcagcctcgggaatgccatgggccgtgggggggcggggaatcacgtggccctgccctcatgaccacagtcagtatgggggatcatgtggccctgcccccgtgaccacagtcagtatgggggatcacgtggccctgcccccatgaccacagtcagtatgggggatcacgtggccctgcccccatgaccacagtcagtatgggggatcatgtggccctgcccccatgaccacagtcagtatgggtagaggaggtgctaggggctctttacatcctcacgtcagaggcttttttagtccaggctttgcaccttctgagtcagtgttcccgaaatgtggtaggagaggagacatggggctgagggggtgtggacgagtgtccacctgggccctgcatagggggcaaggtcgtggtgggggctgcgcagggcaggaggctgagtgctggtgtgtgggcatctggggtcaggtccctgcttggtgggaacattaggaggccgccagggtggacgtggccttaggggcagcacacgtggtgtctgagccaggttcccctgtccgtgctcacagctatgtgactttgggcaagtgactaaagctctctgtgcctggagaggatcatagcaccagcctcacgggatggtcgctggagcttgatgaatagctgtagggctgttggcacagtgcctggtccatagcacagctgaggatagtctctaaccctgaagaagcatgcctcctgcctgcaccccgttcccacacatgccctgtgcccgcaccccgttcccacgcgcaccctgggcccgcaccccattcccacgcgtgccccatgcccgcacccacgatggtgagcatggctggggcaggaggaaccagcgctgccttcctgcccaggacccacaccttctgcagctgagcgacagtgactgccccattaacaccacctggaaaccagtccgtccttctcgttgagaaactgatttcctagtatgcattttttgaatcgaataaatttatgacaccttagatttcacttgcaattttgacttctaaaaaatgttttagtcgttggtaactggtttctcattgaaaacggatgcctatttgtgatactggtgttcccattacaatgtaacacaaagatttaaacgtagagtgagtggaagccccacacaggcaggccgggcggcatccagtggcatcgggcgcctttttcgtggctgcagcgtcagcctgcactgccgggtgtgaggcagacgcgcacttaacggcgtgagaagccagatgtgggaggcaccgggcactgtgggcagtgaggcaggagcttggccgcgtgtggggcagaagctccatggctagaatgggatgtgtttgggtcacgggtctgggggagggtgcgttctggctataactggatgtgtttgggccacagaggtctggggggtgcattctgcatccagcagctctcacatggcagtcgtggtccccgttgctggtctgggctgttgtggagtagcgggggcatttgtgggcgaacccagaggctgaaattccaccccaatcagagctctattccagggaaaaggggagaaattgagtcaggctttgttgttctgcaaaacagtgacgccgctcaggcagcgctgcgggttacagcatactcagtggcttcatttcactctcacggtaaccgctgggggtggattctacgattgtcctcatttttacagaaaaggaagcagagatggttcacagccaagtcacctgtccagggtgatgcctttgcggggcccaccagagcccgccagtgtcgcagaggcggtgagcccctcccgcccaacacacagccccttggcaggggctcttgagcaaacctgcaggtgggcagcttggggcgtttctcagctagcatcacccctgcttcaggacttgaaagcatttgactgggttcgctggcctgaggattacgtgctcggtggaaattagtcattctgggctcttctctccttcactctaggaggactgggacccagagagctccgggatcagctccctggcttggagtccaaaggcagctctgaccacgccgcctggggcaagagggagggcagctgggttccatctccgtggcctggcacatccaaggtccctttgtggaaaaggcacgtgtagcacctgttactggaggataacctgtaactttgtgcctctcccaagggagcacacaggtctacacgggaagtaagattccctgtacccactgtgtctcacagttcagaaaaagtcgtcaaagtgctcagactcaagaagtaaataaggaaatatgaaaacatgactttatttctttctttttttgagacagtctcgctctgttgcccaggctggagtgcagtggcaccatcacagctcactgcaacctcaaactcctgggccaagcaatcttcccacctcagactccccagtagctgggaccacaggcatgcgccaccacactcagctaatctttgtatttttcatagagacagggtctcatcatgttacccaggctgatctcgaactcctgggctccagtaatccacccaccttagcctcccaaagtgctgggattgcaggcgtgaaccaccacgcccagctgaaaatataactttaaaaaaaatcttagctccgtaagaactaagccagatcagaaaacgaattctgtctgtggcccccacagctgtgaaatggagtcgctgactcgccatgctcgtgcacgtgcttagtgcccactgcagaaggctgctttgaatgaaagctagtgtttattcgtgtactcacccagaaggtttctgctgttattgaatcaaattaccctacatgtgaggcatttttcacggccagatgcagacagggacacagacgcagcagcacccaccacacatgaacgttcgggggtcactgcctcgtcttcatgtcttgggagttgctgtttctgtctttaaatccgagcgtcagaaggatctgagacacccgatataaatccctggcttgttaatgatgctcacagagagcggccacgcccatagactgcataatttatctccatcctgcagaattctgattttcatgtaaacctaggacatgttcagagacttggaagttagcgattctagcccctgccttaggcatgcccgtgtggttgtttctgctttggattggctggtggtagcagctgctggcatcacgcaattggcttggctgcagagtgagcccacggaagagggctctccgcaccgactctgtgactcaggcttctactaccaggctcatccgaggacggaggctgtcgttatacaacgcgcaagtgtggtctctgtcacagatgtggctgtcgcagagagtgctgcctcctctcccgtttccagcagatgcttgggaaccttcagaagtcttggggattttctcccagcaccgtagccatgccaccacgagtgaatccttaacgtggaccagcacgggcacctcagatgccaggaccggcgtgatgtatgcgccataagactgttttggagggtttagtcagctggtcacccaggaaaggaaaatgactcggctcttactgtggaatagcaaatgactgagctcgggagagatggttctgcctcaatctgtgactcgaggtggttggtgttaggctgagaaataagaacacaccaaaagtgcctgcccttccgtagatgagagcaggttctgggactgcggggatggggctgccggggcccccgtgtgccatgcctctcacctggtattgcagaaatggcatcatgaatatgggggatcgctctcccaagaggttttctgagggatttcgtgggcagccggcttcccacctgcacacattaacggcggcgtctcttcctcactgcagcctgcaggacgctggcatcggattcatcctggtgatagaccggcgacgggacaaatggacctccgtgaaggcgtccgtcctgcgcatcgcagtaagtgccacccggggctctgccctgcgcccggcccctccctgggctgcatgaccgcatggtgcccttcctctgtgtctgccgcagttcctgctttgtgctgagtgggacagagcccagtcccggcgggtggaggccggcgccaaggccccccctgcttgggctcccaaggcactggtgcctgggtgtgagttttcccagatgaaggaactcttagggagcccaatgtgacttgcaaacaatttccccaggcagagcagcccatatgtttccgaacaccaagtctgagatgctcgggactgaatatgcctcttacatatttatacattagtgattttctcctttccaaatcgggccatctatctttagctgtgacactgaacgagccaccaccgcctcccttccccagtgggattgaacatgcacttcctcttacacaaagcacaacagtcctgaccaggcaggacgggggctgtgtgcagagacgctccaggctggaagttggaagtggtactgcacagctttcctatgtgattttctcctttccaaatcaggccatctagctgcgacactgaactagccaccaccgcctcccttccccagtaacccagcctcgcatgtagccaccctcctttccaaggactttcccttggcatccgagagtctgtttgcagattctgcacgctgccttccatagcagaaggggagctgggtttgctgttggttttaacccagagtaatcatttaagagggaagagattaagtcagcagaagcccccaaatcttatttttgtcggtagctcccacccgtatgcatgaccccggcatggagcatttttcacccacgctcgctctccccgcctgtccgtccaaatttcattgctgccaaaggaccaaaaaaggctgcctgtctgccaagaggtgacccagagcctgggtccaggcacctgcatgttctcacgcccgccacagcccgtccctcccaggctctgggaccctgggtcctcagctgtgatggcacaattgctccaagcattccccagcaccaaaccccagtgaagtcagattctcccagtgaagtcagattctcctggcctttcctgggtcccgcgttcagactacctttgggttccccagcctctcggtggctgctggctggtgcgccaaggtttgaggtatactgaaaaaagtcattcctttccccgcacattgcctcattccttcatcttttacaagaattagaggccccatatctgctccgatgcccacaaccttcatcgttttggtgcaagcctgtccctgagccgctggttctcatcgaagtctttaggatgaggcatctccttgcacccccacggcacctctctgcccctcgccgcggcggatccccgttcctgaccctgactcaacctggcacacaccacctatggcatcgttatctgaaataattcaaaacgcttcaggatgcttccaaaaaagtagacgtgtatagaatcggtcttcctttgttttaacagtgcgttcgtttgcttttgcgtcactataaagacgtacttgagctgggtaattgataaagaaagaggcgtaattggctcacagttctgcaggctgcacaggcttagcacctgcatcttctcagcttctgagggggcctcagggagctgccagtcgtggtggaaggcagcggggagccggcatcacatggtgagagagggagcgagagagaagggggaggtcccagacttttgaacagccagatctccagtgaacttactgagcgagaactcacccgtcaccaaggggatggcgctgagccattcataaggggtcacgcccagacttaatcacctcccaccaggccccacctcagcactgggaatcgcatttcaacatgagacttggaggggacaaaaatcccatccatatcaagcatccccagaaatgcagaaagttctttagataaaagccatcaccagctaacagccatgtgtgcctttcattattgtacgtcttaaatgagtttgcacatgaagtcataggcaactctaaaaattaaatcataagaacccacggggtcagacacacatggacggacaacagatactcttgggaagcacccatccgtcctgggcgggtcccacaatgctcccagcaggcacgtcgtcgtttaaacaacagacaacaccgttacagccgcatcttttatgcttacctgccgctgatataaaccagccatcaggacgactcttagcaacacgtgggtgtaggagtcggcctccctgccagggcacttgcggtgtcaggacgcacctgggtgcctttcatgcccgtggggtccaggcacctgcatcttcacacacctgccacagcccgtccctcacacggctcatgcctcactacatgtgccccgtcccctctgctcacgcctcgctacgtgtgccccgtcccctctgctcacacctcgctacgcgtgccctgtcccctctgctcacgcctcactacgcgtgccccagagcctccgctgatgcctcgctacgcgtgccccggcccctccgctgacgcctcgctacgcgtgccccagtgccctcgcacacacatcaccacgtgtgtgtctcagattaatcagtcactcccgggttagatgacaagagcttccccagatacgaggttactttttaagaaatacaaaaatcattttctaaaagcaaagtatttctgcgaggtcaccctacaggatagcgaagcagcccacagcagacccgtgatttaggtgtcgatcttcagctgccgagtgtcctgttccgttcaccgagtgtgtgatcggatgaatttcttaagcaggttggctcatcttgaaagctctgtcttgtgagcatcataactgaacagttagtgttttagtttttatttttgcattgattcttacaccataaaaatatggctttttctgtccttcctttaattctcagaattgaccaacattggtttggaagtaacagaagccagcattttccagcaaaatcacccagaattctctctgaacaccagtgctttcttgctataataatttacggtctttttttttttttttttttttgagacggagtctcattctttcgcccaggccggactgcagtggcgcgatctcagctcactgcaagctctgcctccccgggttcacgccattctcctgcctcagcctcccaagtagctgggactacaggcacctgccaccacgcccggctaattttttatatttttagtagagacggggtttcacccacgttagccaggatggtctcaatctcctgacctcgtgatccgcctgcctcggcctcccaaagtgctgggattacaggtgtgagccaccgcgcccggcttatggtcatattaatacacagactctgtgtagttagcacgtcctgaggcttttctctgtcccaggcactgcctgggcatcacggatgtgagggaggaagtgagcaaggctcaccgccagctgggtgaggacagttgaggggcatcacaatggggtcacaggcaggggcagcagggagcagccaggagggtggctgagccatggggagggggcagagttaggccccacatgccaggccccatccacctgggctgtgaccctggagagggcgtcttcctgtccccaggcccctgctacccaggagcccgccgcctccagaagggtttggtgcaggaggggcatgagaaaccggcaggagatgatgatggtggacattggatgggccaggagacatggagctcacagccctggtttcatgaaggagaagtgggccacaaggccaaggaggcaggaggcgggcagtggtggcactgtcataggagctggttgtgcatgtgctgaggcttagagggtcactggtcaagggagtgagggcagctgtggacccagccaagcctaggtcctgggcagaccaggaggggtgagggtctctgcagtggggaaggggtgggtggtggggctggcggggaggccccaggctctgtccatgagccacgcactccttggagagggcagaccagggatgaccccttgggcatcttgattcagttttttggaaatggtgcagttgacctgacgtggggacaccaagtagtggctgcagcggggcacctggacgccaacccctgggctccaggccttgacagcgagctttggctggcctaggcttccacctaaagtggctttgggaaaactagcacttagcaacagtccaggccagccgagccctcaagcaggtttccaaacaggcacaggctccagctgcccgaccccaccagggtgcccagctcatggtgctgcgggcgccacaaagcaagcccgtggcagagacttgcctccaagcgctcggccaccgaggaggacgcagcgcttacataatgtgccgggatccggggctatttttagccaccatatgtgctgtcttaagagctgagctctccctaatttggggtgttcttttttcttttctggatgccttcagcatggcttggaatagaaaaattagacattggaagagccaaaatccagtgttcctaaaaccaggctcccaatcgagagcaagacccatgtgatgctgagggcgtgtgggagaaggataggttcacagctacccacccagggggcagaaagatgagatcctctgagaactcacgtctcttctcccttaggcagttgtgcggtcctcagatagaagcatcttttataaaatgctgttgcaacatctaaccctcttccactgtactgcatgtgtgagtgtgtgagtgtgagtgtgtgactgtgtgtgtgtgcgagcgagtgggagtgtaagtgaatgtgagactgtgtgagtgtgtgagtgtgtgcgcgagtgggagtgtaagtgaatgtgtgtgagactgtgagtgtgagagtgtgtgtgtgtgagagtgagtgtgtgtgtgcgtgttcacattttgggaatttgtaatagagtatatatattcatgtttagagctagcctaaatcaaactaaatctagatcctcaagtaggtggctggagaaagtgaatctgatttttagactgcatggggccacaactctctttcctgtaacgccggtgcagtctgtgtgtgcaggaaaggtagaaaacaaggtgtctgagggaccccggacttctaggtcgtccagcaaatctttcacatttgcaaagtacgattgtatgcggcccccctgtgccagctactggggctctggggaggagctcaccgtgggggcggtgggggcggtgggagccgtgggggccggggcggtggaggggggggtggctgggggagcggggaggcgggaggagcagggggggcgggggcggggggggcggggggagcgggggggtgcggggggcggtggcggggggaggggggcggcagggggcggtgggagcggtgctaactccaggaggacttcccggcggaggtgatgcttggtgagagcctgacgggaggaggagttgtccagatggaggggggcgaggagcttcccctgggaacacaaagcagctggctgccgagggagagagggccaggtccgtgtgcccctctcggaagaggcgagaccgtcccccagggcagggaactgaaatgcgcgctgcataactgcggcgacacgggggtgggggacccagctcttcccggtgtggctgagctttctcagaacaccgctgctgtgtgcagcaagcacctgcccaggtgagcacagtccccccgtggtggacagaaggggaccaggatctgcaggctgtctcctccgcaccagctgctgtggcaaatgcgtttcagcgcaccctgcgcgttcaccaaccgccgattacaggggaggagctgggcttcggggcgacgagggaagctgccgatggggtggggcggctctgggggcggcctgggcctttctgtctctgaagcccgagctctctccctactccggtggtcccagggccacggcggtgggcggtgccggtcatgcagaatattgcagggggaggcagcccgtgaggcttccacgacgctgagagcgtctatttaaacgactgtccttcatccgagggttcgctcctcccacctaagggtggatttgacagccttggggtatccagcaggggtgggagatccagaggccccaagcccttcttcactgtgtatttcctggaacatggaatccaagggtccaataacgggcggcacgagccactttgctctctctaaagacctcggaggcgacacagtgaataacaaggttgtcttagtccgggtctgctgcttatatgtcaagagtatctgaaactgggcactttacaacgaaaaagaattcatgccttacagttgaggagcctcacctggtgagatccctcttgctggtgggtcctgaggcgacgcgggacctcacctggcgaggggagagtgagccagcccagggctgcccccgctgcttacaaagccaccaggcccccacccacccccacgacagcccgttaatccgagaatccgtgaatggatgaatccattcatgagggtggggccgtcctgacccagtcacctctgaaaggtactgcctctcaatgctgccatgagtttcgaagtttggtagggacgaacattccaaccacaccaaatgtatatttcagaattgctaaaagaatccattttaaatgttctcagcacagaaaactggtgagtgggtgaggtgacagatcggttaattggcttgatttaatcattccactgaggatacctatagcaaaacatcactgggtgccccgtaagtagatacaatcatgatttgtcagttaaatgtagaaacatttttttaaaaagataaacagagaaaaagaaagagctctgagacccgggctcgctcagcggttttttctcgcagagaagaggaaggagcccgggggtccctgggaccaggtgcctcatgaggctccgtgtgggccgtggaccctgcaggccacgccggcttccctgactgataaacccagagccaggccttgccggtgagaggccagggactgctggctgagcttctccagcgctgctcttcactcccctggatgcctggagcgagactatttgcctggtttatttttttcagcttagagctcgttgcacggagtcagaacccctgcatcccggtggctcaggcatttgagtgaaggtcggatcaggagggaggggagatgcagctgccccacgcatggaggagaagagctgtgagctgcagcagcctcgtgtctttttcctctcaactttcagttcagaaaaatttcagacctacagaaaacttgggagagtctcacagtgaacaaacctcagctgtggccataaacaaagtgcccattcgtgtgtgtgtgtgtgcgtgtgtacaaaaacacacagacatagacacagacatgtacacacatcacacagacacatcacacagacacaaaacacatcacatagacacatacacagacacacacatatatatacacatatacccacacatacatcacataaacacacacacatatcacacagacatgcatacactcagagacatacatcacacaggcacagagacacacatcacacacaaacacacacatatatgcacatatacacacatcacataaacacagacacacacacacattttgctggtgagagccggctctgccatcgtgtcagttcatcccggattgctgacatggtgtctcctgagtggagctgccctctgcataaccacaggcgagtctgcatcgcggccacactgccctctggatgcccacacatggggctttctccacgtgccccgtcatgtccttcctgtatttgttaaaatccaggtccagtgaaggacggcgcccccgtcagctgtccacccttctcagtcgtctctaatccacccagttgttggtttttgttttgctttctgtcttttgtgagattgagatttgcgaagggttgaagccagttgctttatggaatatcctttcatctggtttccttgtaattaggttccacgtggtcctttggggcgggaatcctggtgggtgagcttctggggcagcccgtggaggcccaggatgtccatgtgtcccgtgattggggcggtgttgtgtgctcagacggccaaggaggcgtccggatttccccaggagaaggtgcctctcctcttggtaatcagtgggtcatgtgtggtgatgctcaggacggggcgaaggtcccgtggctgaggtgtccactgaccgtttctgcctgaatgggtggttcggtggtggttgccacagggctgtgttttcaaggggagcagcaggtgcctggcgtctgcatccacacctgcctggagcctccttccatttgttactctgtctcctcctgtgtccctgcagctgtgtctccagtgatcttgcctgtactctccgcctctgcagagtgaggttttcactgattgcaaagtaaacatgcacgccccttcagggtcctggtccttagggagctggttaacaagttgaccagaaaaacaacccgaatactcctcaactcttgatgggagctcagttcacacggctccgaatcggcgaaacgcaaccaacgctgggcagaaccttggcacaactttgctggtgtctgctgagaagccgaggggaggttctggggcttggcttgagctgcggggtgagtgtgggagagacggcgagctccctcccatcaatcaatcaacagactgtcctattttcatagtagtccccacccaaatgtcattcgagtccaatctcaggatcctggatgcacgcctgttctccaggtctgcttcccgtgaaattcgtggagattattgtacattcgggagtgggagtgcgattggatgtgtgtctgcagattctccctgtattttctcccaggctttctagaggaccatttgctagaggaccagtccccaaacggccgcgcttttaggattggttttaggagtgatggcctcacgcacacggcagcggccattctgagcactcgtgtctgaacatctgcaggaacagggtccacgcccattgttttcctcacccggtccagcgtctctgattccggctctaacgtcttcttcatctgttaacacagagacacaaacaaactttcaaatgcatattttttatataaacttgtgtttactgtttggctactgtcagacaaatgtagttggtgaggtttcagttgctctgaaattaaatatataatgtcaagctggataggtgtggcttggagcagaccttaaggaaggtgatttgaacttggggagggtttttcaaacagggttccccaaagtacccagttctacaaagttcccagcatgtcctgttgctttagctgcattggtaaatacatgcagcgattgttttctgagtctctaagaatattaactcagaaaccagtgaactctttttctatctccagactacagtgctgtggtcatcacacatatctgttcctaagttcatccaggtcagcccagaaaatgagcaatattgttttcatgttagatagaaacctataggattactttactgttgagtaatttacaaaaagacttgacagcctccatcccaaattcttcatccagttaccatttatacttacccccatcttttaaaataaagtttttattttagaactttccccagcttttaatacaaacggtcaactccaattcagagaaaattttatttgctgttatatttattcaaagtatgtgtttgtgtacatcgttagcaccttctcactcagctaggatcttccaatttattctatttaatataatgatccaataacttaaaatacgaaaccctaaaactgagccaaggaagagggggtcatgtttgatgctggcagagcctcagggaccagccttgctgcaggggtatgcttcactcccagaggctttaggggcaaatagttgcacctgctggagacgtggacccccccccccgccacacacacacacacacacacacacacacacacacacacacacacacacacacacacacacacctggcttcatctctgagcttcaggctctcagcttgtccttaaagatccaggtgataaaaacgacagtgaaacgtagaagagcgtgattcatcgcaccatcagaaaaagactggttttccgtaaatagtggtgtccaatttcacagcagtgtgagggattttcagtccgccccttgctgagacacagaatctgccctggggcgtcccactctttggggcttgcttctcgaaggaggactgcccaggcgcctcgtccaccaggatcacactcctggcagatgctcagctcacgattccctgcttgtaattcagcctgtccgtcacagcatcttacccacacgtgctccctgcagaaggtgaatggctgtggccttagtctatgtccaggcgtcgtgtgagatggtggggcagagagggcgcagatgcagggcccctccagagcacttccctgggggccgaggctggagagaatgggtgtggagagcagcggagacaggagagtcccccggaagccatcagcctcccctccctcatccactccgcagcagacacccgcagaggacctgccaagtgtgccggccactgagggccgtggtccctgccctccccacgcaatgcagatgaagcagaggtctccatgggaggggtcctgtgggaaaggtgtgcagtgtccacccagtgacaggacattgtccacctgccctggacggggagggcagccgcccagtgaccgagcccttagtttatgcacaaggggcaggggcacatctctggttttaattcctacaaggcaggtgacctggtccatgtttgggtgctgagtgtttgggtgctgtgtgtttgggtgctgagtgtttgggtgctgtgtgtttgggtgctgagtgtttcggtgctgtgtgggtgtggagtgtttgggtgctgagtgtttaggtgctgtgtgtttgggtgctgagtgttttggcactgagtgggtgctgtgtgtttgggtgctgagtgtttcggcgctgagtgggtgctgtgtgtttgggtgctgagtgtttgggtgctgagtgtttcggcgctgagtgggtgctgagtgggtgctgtgtgtttgggtgctgagtgggcactgagtgggcgctgagtgtttgcgtgctgtgtgtttgggtgctgagtgttttggcgctgagtgagtgctgagtgtttgggtgctgtgtgtttgggtgctgagtggttgggtgctgtgtgggtgcggagtgtttgggtgctgagtgtttaggtgctgtgtgtttgggtgctgagtgggtgctgagtgtttcggcgctgagtgggtgctgtgtgtttgggtgctgagtgttttggcactgagtgtttgggtgctgtgtgtttgggtgctgagtgtttaggtgctgtgtgtttgggtgctgagtgtttcggcgctgagtgggtgctgagtgggtgctgtgtgtttgggtgctgagtgggtgctgagtgtttcggcgctgagtgggtgctgagtgggtgctgtgtgtttgggtgctgagtgtttgggtgctgagtgtttcggcgctgagtgggtgctgtgtgtttgggtgctgagtgggcactgagtgggcgctgagtgtttgggtgctgtgtgtttgggtgctgagtgttttggtgctgagtgtttgggtgctgtgtgtttgggtgctgagtgcttgggtgctgtgtgtttgggtgctgagtgggtgctgaatgtttgggtgctgagtaggtgctgtgtgttttggtgctgagtgtttaggtgctgtgtgtttgggtactgagtgggtgctgtgtttaggtgctgtgtgtttgggtgctgagtgggtgctgtgtttgggtgctgtgggtgctgaatgggtgctgttttggcactgagtgggtgctgagtgggtgctgtgtgggcgctgagtgtttgggggctgtttgggcactgagtgtttgggtgctgagtgtttaggtgctgtgtgtttgggtgctgagtgttgggcactgagtgggtgctgagtgttttggcactgggtgctgagtgttgggtgctgagtgggcgctgagtgtttgggtgctgagtgtttgggtgctgagtgtttagtagctgcgtgtttgctgtgtgtttgggtgctgtgtgtttgagtggtgtgtgtttgggtgctgtgtgtttgagtgctgtgtgtttgggtgctgagtgtttgggtgctgagtgtttaggtgctgtgtgtttgggtgctgagtgttgggtgctgagtgtttgggtgctgagtgttttggcactgtttgggtgctgagtgttgggtgctgagtgggcactgagtgtttgggtgctgagtgtttagtagctgcgtgtttgctgtgtgtttgggtgctgagtgtttgggcactgtgtgggcgctgagtgtttgggcgctgtgtgtttgggcactgagtgtttggatgctgagtgtttgggtgctgagtgggtgctgtgtgtttgggtgctgagtgttgggtgctgagtgtttgggtgctgagtgttttggcactgtttgggtgctgagtgttgggtgctgagtgtttgggctctgagtgtttggacactgaatgggtgctgagtgtttaggtgctgagtgtttgggtgctgagtgtttcggtgctgtttgggtgctgagtgtttgggcgctgagtgtttgggtgctgagtgtttaggtgctgagtgggcgctgtgtgtttgggcgctgagtgtttaggcactgagtgggcactatgtgggcattgagtttttgggcgctgtgtgtttgggcgctgagtgtttgggtgctgagtgtgtgggcgctgagtgggcattgagtgggtgctgagtgtttgggcactgagtgggcgttgagtgttcgggcactttgtgtttgggtgctgagtgggtgctgtgtgtttggtcactgagtgggcgctaagtgggtgctgagtgttttggtgctgagtatttgggtgctgagtgggtgctgtgtgtttgagtgctgtgtgtttgggtgctgagtgggtgctgagtgcttaggtgctgtgtgtttgggtgctgagtggtgggagctgagtgtttggatgctgagtgttttggcgctgtgtgggtgctgagtgtttagtagctgtgtgtttgctgtgtggttgctgagtgtttgggtgctgagtgtttagttgctgtgtgtttgctgtgtgtttgggtgctgagtgtttgggcactgagtgggcgctgtgtgtttgggcgctgagtgggcactgaatgggcgctgtttgggcactgagtgggtgctgtgtgggcgctgagtgggcgctgtgtgtttgggggctgagtatttgggggctgagtggacactgtgtatttgggcactgagtgggcgctgtgtgtttgggcgctgagtgtttgggtgctgagtgtttgggtgatgtgtgggcgctgtgtatttgggcgctgagtgggcgctgagtgtttaggtgctgagtgtttgggtgctgagtgtttcggcactgtttgggtgctgagtgtttcagcgctgtttgggtgctgagtgtttcagtgccatttgggtgctgagtgggtgctgagtgtttgggtgctgaggacagacttgtcaaggtcttgctactaggattccacaactgtggaaaaggcattgtataatcctaagtgaggtcccagccacttatgttgcaatcccagagctgggttggaacttggggtgcgcgatctagaattcccgcctgagatcatgttgtcagcagtagagatgagcccaggtgtccctgcagccagcgtggctggagggcccagacttggcccacgccccacgcgtcccctgacttcagaccctaccccagcttcctaacctcagggccctcttcttatggtcctcgctaggccagcctgaacattggagtgtggctggggcagtgcccaggcaggacatcctggtgagtcggtcactcctcctctagtccttgctgctatattcctttcgggctttagggcaatgccattcttttctatatgtcatattttaggtgcatttaacttagttatccagaaatcaaactcagttgcttcagtttctttttttggtgatggggtctccctggatttcagcatctggacataacttggtgtcgagagcaaccatcactgcacgtctgtcatcgcggcttttgagcgcttccttggtgcaggtgtccactgaacgccacgcacgccttggtccatttcatcttcgaaagggtgtcatgagtaggcactgccggtctccccactttcccaatggagaagctgagacacagagaaggggagtgacctacccaagttcccacgccttgtaagaggcagagccagtttccaaataaattcatgtaactgtgtccaaggccgtgtgtgcacaccagggcacaagattatttttatttttgtaggtaacacacacatgtgtctatgttgcttttataaaatttgacaagtgtcttggtttcctggggccatggtaacaaagtaactacagactgaccactgggcgcacagaagctgttccctcccagccccggaggcggagtctgaactcaggtgtggccggagggggctccttccaaggctatggggagcgtctctctgctcgaggcctctcctcagcttctggtctggctgcctcctgggtctccctgggtgtggaagcaccgccccggcctccaccagcaaattctctgggagctctccacgcggtgctgggatcagggcctgccctaatgacctcactttagcttggttacctctgtaaagaccgcgtcaccagccaaggtcacgttcggaggcactgggagttaggcttcgacatcataatttggggggacacagctcagcccctaacaactgtcgtaagctttggacttttacatttgtaagcagcataacgttctgccaagacatgaggcttttcctcttttcttttagaaaagagatgcctttcacagaggccagcatctctaccatgtttatctcagcataaacctgctgcgttgaggatgcctggccgctagctgcgcgcccccggtcagcccagcgtgcaggcaccgcactaggggggctgctgtctgcagagcacgctgcaggcccttgtctctcgccctctctcacaggcatctttcccggcaaacctgcagctcgtcctcgtgcttcgcccgacgggttttttccaaaggactctctccgacatcgctttcaaattcaatagagatgactttaagatgaaggtgccggtaagtgcgccccgcctccatcctgcggtagcagaacggaactcattgccgtcctggcccatctgtgatcatcgaaatcctcgaggagctgacttcagggccacacggtcaacaaaaccccgcaggacctggcgggaagttgcacctcctcaatgctgccagaagcagtacaatcctttcttcccccacccccgcccccagcccccaccccgccagaggtgcacagagcatcaacctcagagaggccaccgtgtgggcatcccatcaggacgcgggtcacgcgacattcatacccccaggagaactacagaacttgagaccctaagggctgagagtccgcctggcccacccgcgaggaactcagcccaggccctgcctgcaccccagggatgagagaagggctggggagggggctgtaagcatctctggacctgggagggagcacccactgctgacagggatgggccggacctgtcctggagcagccaacagggtgacccctgccccatcgccaccacactatcccggcacagggcagcatctcccaacactgcccactgagaaagcaccttcagtcctgatctgctgtcctttaaagaacaaaggcttcacaaagtcccttagagcctgtggagcccggtcaccagcccgagctgtgtagctcccccggagagccctggtcagctgccttggcgagctcacatcttctctgccacaaagagaacagagacatatgggccagcaccaggcaccgcagagcaccccatggcaccagccagatgctactggaaaccaggcaatctggggtgcaggtcgctcactgtgaagctactccctgtgcgctgggaatcaggtggcaccagccctccctccccaccctcgttgcgctacagcctcaatgccaaaggtgcaagagcccttctctgacagggaagaaaacggcctggggcctttccccatgtactgcccccttcccctcccctcccctcccccttgccctcccctcccccttgccctcccctccctcttccctttcccctcccttccctctcccccttcccctcccctccctctcccccttcccctcccttccctctcccccttcccctcttttctctcccctccccctccctcctcctcccctcccctcttttccccctccccctcctcctccccttcctcctcctctccccctacccaagacagccctgggggtcacaaggccccatccactctgcccacccccacgcagtccactctgggtgtcacccgtgaccctggtgcctggcctggggcagtaactgcaggtgcagggtgttctgcatggcacccatggggctctgtgccatcgtgctttggtggccccagaaccaccagcttccaagccattgggaaactctgtgcatgtaccgttttttgtagccttggagaagccttagtgtctgaacagtccattccctagagacgaccagcgacaaaaccgtgcagagcagggactcgtgggcagtgggaggctcatgtcctgacaccaggatgagctaggcattgcgtgtgcagctcagagctcctctgacagctcctctcgtgatggcgtgtgcagctcagcaccctgcagacagcacctctcgtggtggcttgtgcagctcagcgccccgcagacagctactctcttggtggcttgtgtgtgttatggcccttatgatggagataactccgtgcgccctccttccctgctatttggcaggcactgcacactagccataggctttgtgaccacagacgtgtcacggggagcaagaccgacctcacgggtcatccatgccacaggctcccctgcacaacggctccacagcaagccgtcaaaatgggtttcacagaaatcaccggcatcttcaaactcacagccccacttagataattcttgaaattagagtggatgatgtgaaggatgcagttgttgacacgtgtgtgtccgtgtttcagtgccgtgtgctggactcagccatagaaaggagacatgagggagaacagtggccccggcacctctgctgccgtgactgactgtccaaacccatggatggagtgacctcaaaaagggcaagagaaatgcagaaaaatgaagacaaggcgtgtgtagaggagcttatgcggccgtcgcaaccacaggttttccacataaccataaccgtgtgggaactgccagccactctccccgtccggcctcagtggtggtgtgttgatttcaactggtgtctacaatgaccgcggggtattttcggcaggaacagggacaaaaatgatcatctctcccatcagagcactgtttgatgatgttgctggaggaggtgtaaacgcctgttgcatgtccttggccatcacaggccgcactcgtgtggagttttgtgcacctccaacagcaccatttgctgctcaccgtggcatgatgagctcaggcacaacgtgcccatttacgaaggaggcagctgagacacagagtgggcggctggcctgcgggcgagtgggacccacatctgggtccacacaggtccgaagccaggcgcccctgtccacacagccacccacaatgtccaggcgcccccatccgctcagctgcctacagtgtccagacacccctgcctgcacagccgcccacagcgttcaggcgtccctgtccacacagctgcccacggtgtccagacacccctgtccacacagccgcccacagcgttcaggcgtccctgtccacacagccgcccacagcgttcaggcgtccctgtccacacagctgcccacagcgttcaggcgcccctgtccacacagccacccacggtgtccagggtttggataaaatctaggcttggctttgcaagcagtcagacgggaccacaaaatgggtctcctgaggtttagctcaggggttatttgacaccacatcatgttttattaaataccgtatcagtctagagtggggactccactgggggtgattttgccagatagtcacggcagcagaggtgccggggccactgttctccctcatgtctcctttctacggctgagttcagcacacggcactgaaacacggacacacacgtgtcaacaactgcatccttcacatcatccactctaatttcaagaattatctaagtggggctgtgagtttgaagatgccggtgatttctgtgaaacccattttgacggcttgctgtggagccgttgtgcaggggagcctgtggcatggatgacccgtgaggtcggtcttgctccccgtgacacgtctgtggtcacaaagcctatggctagtgtgcagtgcctgccaaatagcagggaaggagggcgcacggagttatctccatcataagggccataacacacacacgccaccacgagaggaggtgtcggcggggcgctgagctgcatcccatccgcacatccatccgcagtgtccaggtgcccccacccacacagccgcccgcagcatccaggcagacgtggtcctctctgtgctgctgggtgttctgctgatggggcagctcttttgggagccaacaataatcccaaacactaccacgcattccctttctcctccaggtcataatgctgagctccgtaccagacttacacggttacatcgataagtcgcagctgaccgaggacctgggtgggaccctggactactgccactcccggtggctgtgccagcgcacggtgagccgcgtcggggccagcggggctggctgataccagctcgagtacttccacagaatcgctcttgcattacaacacggccctttccaaaaacacattcacattaacagtcgttttctttcccaagaatgaggagatggtctcagtggaccttagtcattgtaaagaagtaacgtgagtcataagtttgggagtggctttctctgggcttggagaccaaaaaaaaaaaaaaaacccttgcgttgtggtttgcaacactcactgctctcaacggggagaggcagcgcaggcacaggcgactctaggtgacgggcacacgtgtagagtgtgcctggtatgtttctgaagaggtcaaggagggcaggacgctatgggagggcgttcaccgtctttgcgtcagccggtctcacctgatgggtctgtgtgggaacggtttccgccggtgtctgctttcagggcagcaggaggtgggtgcagtgcacaaggcatgcaattgtgttttctctgtccccaaggccatcgaaagtttcgccctcatggtgaagcagacggctcagatgctgcagtccttcgggaccgagctggctgaaacagagctgcccaatgacgtccagtcgacaagctcagtgctgtgtgcgcacacagagaagaaggacaaggcgaaggtacatggggggtgctccggctggaagctgtggggggctccggtcagtcagaagctgcgcggggctccggtcggaagctgcggggggtctttcgtcccagcgggagtttgtgtcagcagcacgtaagaccaagaagtcagcaggcttgagatgccttttgatggcaattagctcggcaacctctccgacgagaacggaataaaaggagtgtaaatgaaccctgtagattgctggctgcgcctgccattctggcgttgggtcaaccattggccctgggtggccgtggcttcaggagtgggaccaggggtggctcctctcaggagcacttttggctgtctgtgcggggagctcccgaatagacatctcttgcttctgagtgtgaccgagacaggatgtctgtgccggtttctcatgccgagcaggcgatgaagtggcggttggaattcctgtttgcagaacactcccagtgctcacgtgtccacagcgcttgctggaacaaacgtattctgaggagcacgtgctccctgctctgtgctgcccctggcccaccggcacgctgctggctttgcagcaatggtagcccagggccatgacctgctggtgtgtccccgaggactgtgcctctgtgctcaccgggccgctccaccgtgaggacactgaggaccaggagcaggcaccatgagaaagcctggtctccagtgactctttcaccttaacccgttgccctgagtgccctgtaatggcagctctgccccggggcacacaggagtgagggaggcccccacatcaccccgcctgcccgcacgaccccacagaagagactgggaagactcgggggtcggggattgaccccttcctcagtccccgccccctcaagagcaaggccccacgaggcctcaccaccagcctgcgctgtgtgcctggacggggccgggacatgaggctgcattctctccacaggaggatttgaggctggcactgaaagaggggcacagtgtcctggagagcctcagggagctgcaggctgagggctcagagcccagtgtgaaccaggaccagcttgacaaccaggccaccgtgcagaggtgaggcccggctgccttcctgccctcatcctgtcccagtccatggcaggatcctctcaggcacacagcttctgcaaaagaaacaggccacggaaatagcaagcagcgtggcaggcaaccccactcctggccagggccagcacagcagccggcctccgagcctctgtgtgggcctggctcctcctgctgaaatgcttttctctcgaaccccacagaaagccactgttttggggacaatttcctagagcaaacgcccttttgccggcatgaaggaggcgttaggggaagcagaggcgatgggagtgccttagacctggggcttctgcattccaagcggggcttccacagacagggagaaagcctggggttctccttgctgcagatagtgtttcttactttcattgtgaaaggtgtgattctcatatttctcccttgggcttccagctttatagcagcacagggtagggcactcgtgtggttggcatggtgctctaggatgtccagaactccctgagcatccccctcaccccccgagaactccccgagcctccccccgtcccatcctccccaagactccccaagcctcccatgtcccatctcgctggtgggtgctatcagccctgcctccgagctgaggagcagggcccgcacagctggacagcggcttgtccggcagggccgtgcggggcgcacccaggcctggaccaagctggtccttttgactctcagctgcctttgactcccacgcagcgtggcccacaccctgagctgccttctctgccagggacatgccaagggccccggggactcgacggcgcatccttgaggggctcctcgtagatggggtgccgtgacccacgaggcagaggctgcagcacagcccatgagggtgggccctgccctggcctgtgtcaggcaccttgtcagcttcccaaagactcagtttcctcatctgtaaagtgacgctgatccgtgcacacgcctggcagggtgggcgtggggctgactgggtggtgcacagctggagtcccagctacgcggaggcagaggtcgcagtgagccgagattgcacctgggtggtgcacagctggagtcccagctacgcggaggcagaggtcgcagtgagccgagattgcacctgggtggtgcacagctggagtgccagctactcggaggcagaggtcgcagtgagccgagattgcacctgggtggcgcacagctggagtgccagctactcggaggcagaggtcgcagtgagccgagattgcacctgggtggcgcacagctggagtcccagctacgcggaggcagaggtcgcagtgagccgagattgcacctgggtggtgcacagctggagtgccagctactcggaggcagaggtcgcagtgagccgagattgcacctgggtggtgcacagctggagtgccagctacgcggaggcagaggtcgcagtgagccgagattgcacctgggtggtgcacagctggagtcccagctacgcggaggcagaggtcgcagtgagccgagattgcacctgggtggtgcacagctggagtcccagctacgcggaggcagaggtcgcagtgagccgagattgcacctgggtggtgcacagctggagtcccagctacgcggaggcagaggtcgcagtgagccgagattgcacctgggtggtgcacagctggagtcccagctacgcggaggcagaggtcgcagtgagccgagattgcacctgggtggtgcacagctggagtgccagctactcggaggcagaggtcgcagtgagccgagattgcacctgggtggtgcacagctggagtgccagctactcggaggcagaggtcgcagtgagccgagattgcacctgggtggtgcacagctggagtcccagctactcggaggcagaggtcgcagtgagccgagattgcacctgggtggtgcacagctggagtcccagctacgcggaggcagaggtcgcagtgagccgagattgcacctgggtggtgcacagctggagtgccagctacttggaggcagaggtcgcagtgagccgagattgcacctgggtggtgcacagctggagtcccagctacgcggaggcagaggtcgcagtgagccgagattgcacctgggtggtgcaacgctggagtgccagctactcggaggcagaggtcgcagtgagccgagattgcacctgggtggtgcacagctggagtgccagctactcggaggcagaggtcgcagtgagccgagattgcacctgggtggtgcacagctggagtgccagctactcggaggcagaggtcgcagtgagccgagattgcacctgggtggtgcacagctggagtcccagctactcggaggcagaggtcgcagtgagccgagattgcacctgggtggtgcacagctggagtcccagctacgcggaggcagaggtcgcagtgagccgagattgcacctgggtggtgcacagctggagtgccagctacttggaggcagaggtcgcagtgagccgagattgcacctgggtggtgcacagctggagtcccagctacgcggaggcagaggtcgcagtgagccgagattgcacctgggtggtgcaacgctggagtgccagctactcggaggcagaggtcgcagtgagccgagattgcacctgggtggtgcacagctggagtgccagctactcggaggcagaggtcgcagtgagccgagattgcacctgggtggtgcacagctggagtcccagctacgcggaggcagaggtcgcagtgagccgagattgcacctgggtggtgcacagctggagtcccagctacgcggaggcagaggtcgcagtgagccgagattgcacctgggtggtgcacagctggagtgccagctactcggaggcagaggtcgcagtgagccgagattgcacctgggtggtgcacagctggagtgccagctacgcggaggcagaggtcgcagtgagccgagattgcacctgggtggtgcacagctggagtcccagctacgcggaggcagaggtcgcagtgagccgagattgcacctgggtggtgcacagctggagtgccagctactcggaggcagaggtcgcagtgagccgagattgcacctgggtggtgcacagctggagtcccagctacgcagaggcagaggtcgcagtgagccgagattgcacctgggtggtgcacagctggagtgccagctacgcggaggcagaggtcgcagtgagccgagattgcacctgggtggtgcacagctggagtcccagctactcggaggcagaggtcgcagtgagccgagattgcacctgggtggtgcacagctggagtcccagctacgcggaggcagaggtcgcagtgagccgagattgcacctgggtggtgcacagctggagtcccagctacgtggaggcagaggtcgcagtgagccgagattgcacctgggtggtgcacagctggagtcccagctacgcggaggcagaggttgcagtgagccgagactgcaccactgcacccagcccaggtgatggaaccagaccctatctcaaaaaataaattttaaaaaaagtttttaaacttttaaaaaataaaaatgaacaaactcggcggctcagcctagtcgcagtgacctagagggagagaagcaggaaggaaaggacacagcccctgatgctttctccagggcctccctcccatgctgacggccctgagtgcccgcgcccgcagatcccaggtttaggtgcagggagtgagcggaggccaggatctcaggaaggcccggggtggagatgagccttggggtcgcttgaacacccaccgcgctccacgttgcatggggcgccgtgggccacacagacggtcaactcctcctctttcccaggctcctggcccagctgaacgaaaccgaggctgccttcgatgagttctgggcaaagcatcagcagaaactggagcagtgtctgcagctccggcactttgagcagggcttccgggaggtgagtggccctgggtggagccggcagccgccctgatgctcacggggcctcctgtgcctgcgccctggtcccagtgccgggagctgagccgtgccacccagttgactttggcttaatgcagaaaagtctccgcttgccaggtggagcctgtgagattaagtcaggctgagccttgaaatgcacgattgatgactgcgtcattgtatagaaaggtgattgaaaatcagctcactgggatgcacttacactgcattattcgtaaagtagcaggaagcctttgctctcccttcatagtcatttgcatgcccttttattcaacatgcatgtaggatgtgcctgctgtgtgccagactgtaggacggcgtcacagtcatgaggtgcacagcgacacggccagtgcagccagacccagacgtctccctcctgcggcccttcgtggactcacccatgtccctcctcagcccccggcaaccactcatctgtttccgtggctgtgcttttgccatttcaagaatgtgacattaatgaatcccacagaatgtcactctcgggatttgtttgtttgctcagcacagctctctgcagacccccaggtgccggtggctcactcattgtgttccccggtgtggacggaccacagttctttcaatcattcacctgttgaagggtatctgggttgtttccggatttgagtattacagataaagctgttacaaacattgatatactgatgttggtgtaaatgtaagttttcatttcttgggcttaagtgcccagaatgtaattgcagggttatatagtagttgcatgtttcgtttaagaaaatgccaaacggttctcagtgtatgagagactagttgcttcccctttccccagcacgtggtggggtagtgattcttcatattatgctcacatcctgatgtgtgtgccatctcacggtggttttctgttgcgtttccccagtgttgatggtgctaaacacctttccacgtgcttatttgccattcgcatatcctctttggtaaaatgtcttatttctgttgcccattttctaactggattgtttggttttgtgcttttgttttacggttttgttacattttgagaattccttatatactgcagatactagttctttgccacatatgtggtttgcgaatattttctcctggtctgtaacttgtcttttcatcctctttaacagggtttttcacgtagccaaagcatttaattttgacgaactccaatttgtcaatttctccttttaaggtttatacttttggtcctagattccaagtatattcccctaagcctttttcccctcaaatttcatagttttacattgaagtctatgacctaatttgagctaatttttgtataaggtatgagaattagatcatgatttgttttacctctggatgtccaattgctgtagcactgtttgttgaaaaggccctttcttccactggatttcttctccaccgttgtcaaagctctgggcacatttgtgtgggtctgttctggagactctctattcaattatgtttatctacatacctcttcctctgtctgtaccacaaggtcttaattgctgcaactatataatgtcttgaaatcaagtacactcattcttccctctttgttttctttttcaaaattgtgttagcttctagttcttttgccttttcatggcaattttaaaattatcttgtctacatatatgaaaacaaatttcctggggttttcataggagttgtgttaaacctatattttaaggagaagaaatgtctttactgtgttgactcttctagtcaacaaacatggtattcccaacatttgatttctttcatcagtgtcgagtagttctcagcacacaagttcagtacgtattttgtttgacttacctttaatattccactttaagaagtcatcacagtattatatttttaattttggcatttatgtattcattgctgcacatagaaacacaattgatttttgtatatttatcttgtctcctgcgaccttgctgagcacacgtatttgagatggttttttgtgaagtccttgacattttccatatagaccatcatgtcatgtgcaaataaggacagtttggtttcttcctttttgaagatatgccttttattctaccccccacccacaacaccctgccccactgcgtactgccccaactagagcttccaccatatgataagagtggcgagactggacatctctgctttgtccccaaccttaggaggaaagtgtttagtttttcactgtcaggtgtaatgttagttgtaggattcttgtagatgctcaataaaactatctgggcctagagatttctttgggagacttttaaaattatgaattcagtgtccttaatagttacgcaactattgaaactatctgtttcacaatgagatatagtagtgtgcttttcaaggcaatgtgtagggttgtttatagtattctttcttatctttttgacgtctgcagggtctgtagtgatattccctgtttcatttctgatatttgtaatttgcatcttttccttttttctttgtcaatctagattgagatgtatcactcctcatctttccaaagaactcgttctttgtttcattagttttctctgttgttttctgttctcagtttcattgatttctgatcctacctttattatttctacaaattgctttggtgggaacttacattctttatttgagactgttcctcttttctaacatacatatttaataagaacactataaatttccctctcatcactgatttagctgtgttccacaaattttgatgtattgtattttctttttcatttactccagctttttttttttttttttccaatttcccttggaacttcctctttgacccatccattctttaaatgtatgttgtttggcttccagtgttcagagattttcccgttgtctttccattcttgatttcaagtttgattcattgtaatcagagaacatactctgtatgatttctgttcttataaatgtgttgagatttgttttgcagcccaagaatatggtctttcttggtatatgttcctcacttgaaaagaatgtgtattctgctattgttaggtgaagttttatacatatcagttagatcctgttggttgatggtattgagttcttctatatccgagctagtttctgagaggtggtgcattatccataactcagtggctgtgcgtaacatggagagaagtctcactcatcagctgtgccagatgcagggggttcaaggatggacaagaatcctgccttcctggccttcaaccccaggccatctgaactacaacccccttggcactgggatgtctgcgtacacacccattctcaggatcatttccaataacaaaaattaaaagcttttgtatttaaaggaataagtggtcatatgttttaaaaatcaggccaggcatggtggctcacacctgtaatcccagcactgtgggaggccaagacgggtggatcacctgtggtcaggagttcaagaccaacctggccaacatggtgaaaccccatctctactaaaaatgcaaaaattagctgggcgtgatggctggtgcctgtaatcccagctacttgggaggctgaggcaggaaaatcacttgaaccagagaggcagaggttacagtgagccaagatcacgccactgcactccagcctgggcaacaagaacaaaactccgtctcaaaaaaaaaaaattaaaaattaaaataaaaatcatttctatgacacccattgtcttcctgccaacagcagaaatcgtagacattagaagttagtagcaagctagaagggactgagttacataactctccacacctaggatccagtaggaatgctgacaattccagtgtccatattgctgctggctttcggctcccagggcctttgtccttgcgtgatctcatcttctcctcatgctgttttcaggcgtgtggttgataaacggaggcacacacaagccacagagaaacaattgttctgccagtgaggtcactggtgggtagcgtcgacccagaggccccacggtccccgcttgattggtgaccactcggggccgactttgcacctgtctgactgtggtccctgcttgattgatgaccacttggcccgactttgaattctgtcatttccctgatctggagcactggagtgggttctctctgttcaggtgagggagacacccccctgagatgggccctcctctgttccaggtcaaagccatcttggacgcagcgtcccagaagatagcaaccttcacagacatcggcaacagcctggcgcatgtggagcacctgctgagggacctggccagcttcgaggagaaatcaggcgtaaggcggggtcccggcgggggcggcgggagagtgtgggcagcatcatcaagtgctgctcaggaaggcgcaggaatgggcctcccgcctacggagaacggaccccacagccccccggggatgtccatggggtggggggtgctgctgcctgtacccctcccctcccacaccccacccacagcacatggccctgcccggcctcctctgggtcaggtccctgcagacggtcaatgcctttgctgggaccaccacagcccccagaagcacttgccacagaacagcttcggggattaagcagcatctcaggcatccgcagcagtaaacaaagaaatcaagacacacgtgtgccccgggacacacatcccgtacagcaaggcactgtgtgcctcgaacagaaagaggcctgagctggtcctctgggtggccgtccacaggtggccgtggagagggcccgggccctgtctctggacggcgagcagctcattgggaacaagcactacgcggtagactccatccgcccaaagtgccaggagctccggcacctctgtgaccagttctctgcggagatcgcaaggaggagggggctgctcagcaagtccctggagctgcaccgccgcctggagacggtaggccgagccggaccccaccccactcccccccagctgcggaaccagcctcttcctcccacatccaccaccggctgacccttgtcgtggggagggcagctctttggctggaaaatgtccttgcacccttcgtttctggtcttgttggcctagagggtctttttctagaattcatttgccacagttttatttctttttttttttttttctcactgcaacctctggttcctgggctcaagggatcctcccacctcagcccccaagtagctgggactgtaggtgcatgccaccgtacccagctaattcttgtattttgtgtgtgtgtgatagagatggggtctcactatgttgcccaggctggtctcgaactcctgggctcaggtgatcctctcaccttcacctctcagagtgctgggattacaggcgtgagccaccctgcccagccaataatgatttctttaaaagatccagaagcttaaggcctggttgatcctactgcacttaccctgcctctccaggccccgccctgggtaattcactggtgttgtccagcactgtgtccccttgggattggccttgtccagcactgtgtccccttgggattggccttgtccagcactgtgtccccttggggtgctttggacagggtggcgggagcacgaggagtcggtggcccgggatctgtcgggaggacaccccggcagtgtgtgcctggacagggtgacgctctcaccctctcacggcgtcctgccctcggcaatgctctgtgtttccagtccatgaagtggtgtgatgaagggatttacctgctggcctcacaacctgtggacaagtgccagtcccaggacggcgcggaggctgccctccaggaaatcgagaagtttttggagaccggtgcggaaaataagatccaggagctcaacgcgatttacaaggaatacgaatccatcctcaaccaagatctcatggtaacgctgactcgggctctccatttgcagcttgctgtcccgagcagtgaggcattcctctgtgggaagtttgaaagaatcatttaatgaattatttgtatttatttattattattttttttttgagatggaatctcgctcttgtcgcccaggctggagtgcagtggcacgatcttagctcactgcaatctccgcctcccaggttcaagcaattctcctgcctcagcctcctgagtagctgggattacaggcgcccaccaccaagcctggctaatttttgtatttttattagagacaggttttcaccatgttggccaggctggtctcgaactcctgacctcaggtgatccacccagctcaacctcccaaagtgctggaatgacaggtgtgagccaccgcacctggcccatttaatgaattactaccaaataataggcatatgagagaaacacacagttgggaggtcaagctgaattttcctttcaacacagaaattatttccacgccaaccctgcgaggtggccatcccgcctccgctggcagactttgtggcatgggtgtgttcttcaggaagggcctggccctgggacctggtgatgcccttgagaccaggctcctcctgagccctccacatgcctggggaaggctgcaggcccctccctcgcatggagctgccctttcccgaggccggggccccgtcccgtgtgggggctgcatccccctctccgtccgtagtggccagggctggacacagctgcgctgcgctgacagaccccgcatggagaacatttaaagcgggggttgggcgtgccccggcacgttctgcgcctgactgtgtatttttagtgatgacaccaacatgtgcaaggcaccttactgagcatgcggtttcaggagcacgtgcgaaaggtcttccagaagcaggcaagcatggaggaggtgttccaccgcaggcaggccagcctgaagaagctggcggccaggcagacgcggcccgtgcagccggtggcccccagacccgaggcactggcaaagtcgccctgcccctccccaggtctgtgtggccgcccggtgccccgggtgctgtgggaccctcgggggagccccgggcgttgagagcttggtacatctgaggcagccacctgcgaaaactgtctccacacgcctcctccccttccacctccgggccccagttcagggcctgagggccggttcccgccacccctcacccatgtttataaatggagttttgtcaggacccggccacgcccatcctgtgccacgcacatcttgtaggcatcgttgtggctgcttttccatgaggctggcagggttcagtggtctcagtgaagcccacgtggcccaaaactggaaacacagagctcccacagaggaaccatctccggccttcccagctccagcctctccacggtctgtcctttcccggtgctattgccaaacaacattcctcacacacggcccagaccctgggctccaggagccctgaagagccacgtccgcgcacctcagtccggcgcgcattgctggtcccaaacccgccctctatgccgagccaggcacggcgccatttcccagagactttcccgccacctctgtgtctcaaaacgaaccctcttcccatccttgctggtttctcacacacgaacccaccaggcgagctgctgccccagctttggcgaaagtcagctgtcaatctcaggggccccgggggccaggctcttgccttcctgtgctgggtcccaggcgaccttattttctgcctgttgggagctctcccaggtcggagcccacaggcgctgtgtccccgtgggctgtgggaacgtggggtgactcagggcagtgaggccccaccgtcctcccccttcccgcaccaccacctgtggcctcaaaggccaagtcctgcccacgccaccacctgtggcctcagaggccaagtcctgcccacgccaccacctgtggcctcagaggccaagtcctgcccacgccaccacctgtggccccagaggccaagtcctgcccatgccaccccctgtggcctcagaggccaagtcctgcccacgccaccacctgtggcctcagaggccgagtcctaccctctcctcggggccttttcccgctgggtgcacttcccctctccagagggtcagaggggacttcatgccccgctccccttcttcccaacaggcattcggcgaggctctgagaactccagctccgagggcggtgcgctccggagagggccctaccggagggccaaggtgaggcttgcccaagacaaccccgccatccacacccccctccttggttcacgctgggcctggttctccgtgtggccccccctcccgggcactgcccagctacctggccagctccccatcgtgggaattcagccctgtccccatacgggaactggtgggctctggccttgagagttggcccttgaggttccgtcccgcctttcagacctgacgctgtttttctccccagagtgagatgagtgagagccggcagggccgcggctcagcgggggaggaggaggaaagcctggccatcctgcgcaggtgggtgcgctgcccttctgtcctcacaggggccctccgaccgcagcctgaaccaccagatgccgtcaggcactcgagcagatgcctcacagatagaaggctggtgcagaagtcattgtggttcttacttttgcaccaaccgatacccagagggcctgccgtggctcgagcgtgtgtcctggtccccaccgcgtgaagcacacacacgccgcacacacaccactcgggattcaggagggaagagagggcgatggctgaatgcaacagtgaaggggcatcttcgccccagcaagagcctccacccgccactgccattcacaggagacaccactcaaaggccccaaccagcaccagctgcagcagcagtcaccagctgctcagggctcagtgtggcaggcagtggtgccaggcagctggtgtgtgggagggcatcgtctccagccctccttttcccctgggattcctggaccctcaaactcagggagtgttgtgcaaacaaaagcagttctctttcctccttcacctttaagaaagaaagacctcactggtgcagggccagggaatgcaggtccccagagcaaaactgggaaggagccaaacacccatgaggcacacgcggctccctcccagaggccctcgaggaagaggaggaggccacacaccgaccaggcacccgccactggcttcacactttgcactgtctccgtttttagtatttgcactgaatatgtttgcaagagacgcttggaaccacgtctccccctttcaccatcaaaactccaaaatcaggaaagaagaaaaggctcttcctgatgtgttgacaagcaggtgtccgcaggcagcgccagtgtgaccctgcagggttgggagacggcgcaaaattgggaattacaggaaactgagcttggtgtgaaagctgagtctgtcacttccggcttctgatggaagctggtgaaacaggatgggaaggaagaggggcttgccaagaagcgtccaggcagaggattgtccacacggaggagggtccaagcagaggggcgtctgcacggaggagggtccaggcagaggaatgtctgaatggaggagggtccaggcagaggagagtccatacggaagagggtccaggcagaggggcatccgcacagaggagggtccaggcaggggagtgttcgtatggaggagagtccaggcagaggagtgtccataccgaggagagtccaggcagaggaacgtctgaatggaggagggtccaggcagaggagagtccatacggaagagggtccaggcaggggggcatccgcacagaggagggtccaggcaggagagtgttcgtatggaggagagtccaggcagaggagtgtccataccgaggagagtccaggcagaggaacgtctgaatggaggagggtccaggcagaggagagtccatacggaagagggtccaggcaggggggcatccgcacagaggagggtccaggcaggagagtgttcgtatggaggagggtccaggcagaggagtgtctgtacggaggagggtccaggcagaggagtgtccatacggaggagggtctaggcagaggggcgtccgcagggaggagcagcaagtgctcggccctgagacgcagaaggagtggccctcggctggcagttcctgggttgtgagagggagtccagagccctcttgctccccagtcctctcccctgtgccgagtccggggcctctgcgggccgacagctgtcttagaacaagcttgctgaacaacctcaacccaggaccagccccctggctccagtttctgtgcatcacataagcaggcagggccgtaggctgctgaaaggtgctcacacccacagcaagacctgcgcagccagcttgtgcaccctccccttctggatccagtgtggtgggtgcagggtcactccccggaccaccactgcccacctgctgtgtgtgagggcgtgggcagggggcagctccggcgatgccagacccccgccctggccacgaggggccacacagatacccaccacgaggaaggctcagggaggccgggcagcaggcgggcgtcttcttggcagaagagactcgggtggattctagggatgggtcctaggagtaggatgacttgcccatgagcgtgaggaactcagctcattttgcacaggtgggacccaaaagcccaggaggcgagtctgggaatccctcctaccaggcggtgtgtgccgggccaggggcaagacactgccggccagtctgggaaccagggaggcttcagccgccgtctgcagggtctgaggccgcgagctgggaggggaaccccgaggagcgtccagcctgtgggctttgggtcgccgccagtcccctcctgctgggcaggccatcattctaggtggcacctgtgagactgtggagcagaccattcctgctctcccagtgctaaccttttttgctctccacatgacctgccaccaggcacgtgatgagcgagctcctggacacagaacgggcctacgtggaggagctgctgtgcgtcctggaggtgaggctggactcggggagggccgactgccacggggactcccctgggccagctggtggggcttcctctgacaactgctgctcggagcagcctgctgtccaccaaatgcatgtgagagagcgcccacagcagcctggtcgggccccagacggggagcccctgggggcctatcaacaagacacagaccaggcagctcaggggggtccgtacaggggacaagtgtagtgataagaaagaggagctgacacacaacagatgcacaaaccacacacacatcgtcaccaacacaggccacagggtgcctgcgattcccggcacggggcactccagggcaagcaaaactcgtcggaggtgggaggcagattagaggtgaccttggcagtgggctgttgcctgggtgagcttgatgtgagtggtggtcacctgagtatagacaggcatctcattcacccagtgtgcacaggtagtgatcacctgagtgtagacagcgagtgtgcacaggtggtggtcacttgagtgtagacgggtgtccgaatcaccgagtgttcagaggtggtggtcacccaagtgtagacgggtgtctgattcaccgagtgtgcacaggtggtggtcaactgagtgttgacaggtgtctgattcactgagtgtgcacatgtggtcacctgagtgtagacagcgagtgtgcacatgtgatcacctgagtgtagacagcgagtgtgcacaggtggtgaccacctgagtgtagacagcgagtgtgcacaggtggtggtcacccaaatgtagacgggtgtctgagtcaccgagtgtgcacaggtggtggtcacctgagtgtagtcgagtgtctgatttactgagtgtgagcaggtcacccgagtgtagacataagatttgtgccctctgtttcagttacacctgaatcataaaaggttaaaagggagaagggtagaacctccaccccattcccccaaattggtgctgttcataatgcttttgctttgatggatgcctgtcccggtaacttagaaatcacccgagaataaagatgaagggctggcctggcccacagatgagccggcatccctggcccacctgcccccccacagcatcaggcccaggacccccgccgacctctgcgctctccctgcagggctacgccgcggagatggataacccactgatggctcacctcctgtcaacaggccttcacaacaagaaggatgttttgtttggaaacatggaggaaatctatcacttccacaacaggtgggcccttccccccgacacaggcacgcacccgtgatctcttgcagctaatggtgctggcttcagggggctggaatgggggtggaggccaggccatgcctggctagggaggggcgcccaaggggtggactcacagaggcacaggcttgagtgtgggtacatggggccatctctgagcgcccacgtggcaccgtacctggtggcctgtgtctaggcagccaagttgtaagtgagccgccagccgtgaggagagggctctgagcccgagtgcgccctgttttgtggtgcaggaaatgggacccgcctgcccctcatcccctcctcatcctgctgggcaggtggaagccggaaccccctcccaggtgtgtattcggccctttagggggtcaccgaaggccataccacatagcaaggcctgttttgttcccaagctcttgaaaaggacggcaaactaggcgttccttacccatcatgggggctgcttgtcccccgagcgacccgtggcctctccagtgcaggtggcctgtccggcctcttgtcctccactcctctgagctgtttggctgctttaacacagttttggggagctcatgggaaggtgtagggtgcacacgcagtgcagaatgccagggaggctgcagtggacagcccccgctgcgtgtcctggaaggaacccatgtgagtggctcccatgcggccatgtgcttggggaccagcgtgccccactggccatgggaatcgccagtgcttgggatgttgttctgacacctgtttcttgccctctcatcacctcacctgccacttacaaggaggcagcaggtctgcagttgaccaccaaggagccttccacgtccacggagcttgggcagaaccttagtgtcccttagtatctgtcctcatggcccccagggtctcagccagtcctgcacgcaggggtccccacagctttcagctgttgtgctcatgccccaaatccatcccccagacggttttcccctccagccggacttcctccaggggacagatgcaacagaaaacagcccaggagcctgggggcggcgctgcctagggccagggctcagggtgtgtctgcagagaacccacagacccacggccagttatgggggtggcgcctccagggccctgaaaggtcccatctctgtctttgcctgcggccctgtgagccgtgtgtgtgctgagggaaaagcagctccctccaacttctgtgtgcagccaaggccagaaatataaagagactcagcctggggctgcacctgctggcgcctgagagcttggtgctcaggacaggcgtggctgcggcgtctccaagtcatgcggggcagattgcccagagcaaggcgtaacaggcttctgaaaaatgacgtccatccacttgtcactggtccacgtgactcggcctgtctttcatactacttaaaaaccttctttgtctaggatattcctcagggagctggaaaactacactgactgcccagaactggttggaagatgctttctggagagggtaggtggtgttttgacgtgtattttgtcacaacttcttaaaagtactgaataatgacttcagattctactgcaagttcctattctaaccaactgaaatcacaaaatacgatgttttcaatttggctgagataccatgatgctcctgtacccctagaacctcctgaacccccagaacctcctgaaccccagaaaacctcctgaaccccagaaaacgtcctgaacccccagaacctcctgtaccccaggacctcctgtaccccagaacctcctgaaccccagaaccttctgtacccccagaacctcctttgcccccagaacttcctgtcccttagaaacttctgagccctgtgccttaaaaccttctgtgcccctagaaccatctgtgccctagaggcacccaggagcaattgcacttcacaatggggctagggtctgttttttgctaaataacaggtaatttgtaaaactgccagagaaaatgctagaagttctattatataaacaaatcaacaaaccacaccataaatggccttctaagaatggctgcggtggaaccccgtctccactccacgcctgtgctctgggaagtcaggggctctgggacagggagccccattaatggagggcaggccccccagcggagcctgggagccagtgccggccctcggaagctatggggccagcagcaatgcctcgcagggccgggaagacgctgcgtgatgcggtgcccgtccctcaccgcgtaatgcggtgcccgtccctcaccgcgtgatgcgctgcccatccctcactgcgtgatgcggtgcctgtccctcggtgcagatggaagatttccagatctatgagaagtactgtcagaacaagccccgctctgagagcctgtggagacagtgctccgactgcccgtttttccaggtttgtccccggaccttcctttagaacgttactccctttcctagccgactcctgaggaataatgaaaattgtgcaaaccaaaggctctgggttggttccaggaatgccagagaaagctggaccacaagctgagcctggactcctacctgctgaagccagtgcagaggatcaccaagtaccagctgctgctcaaggtgggctccgcggtgaccgtggcccggcctccccagcacctgctggccaggtgtctgtgccgccctggggccccgtccccatcgcgccctgcccctcccaggccaagggcacctcttccgagcctgtgctgaggctgggatgcctttcgaggtcctactgtgcgccactgttaggggtctgaggacgcaggtgagcagacgagtccccgtccccatgggttggcacacagcccagcccacatgggattctgtgtgatgtgctgacccgtccctccagggtggagccgtgcccggattatctggcacacagcagggacgtggggcggcctagactggggattccagctatgagtttgccatgtgggtccctctaaccttcaggcaggaaactgcaactccatgcctttggccagggttagggtggcgagaggaaactccccagggagcaggtgcgaggggtttgcacctggcatcagggtggcaggagggagctccccggggagcaggtgcgaggggtttgcacctggcatcagggtggcaggagggagctccccggggagcaggtgcgaggggtttgcacctggcatcagggtggcaggagggagctccccggggagcaggtgcgaggggtttgcacctggcatccgggtggcaggagggagctccccggggagcaggtgcgaggggtttgcacctggcatccgggtggcaggagggagctccccggggagcaggtgccaagggtctgcacctggcaggggtgctgccccatctgcagcaccactcagtctgtcccagctgcaggagggcaggcagggcagctccccacagaccaggggagggtgagcagcatccctacctcgtgccaagctcctgaggggtctgttccaggggagccagggctctccgtgtcccgacgcggttgcctcaccccatgcccctcaggaaatgctgaaatacagcaggaactgcgagggggctgaggacctgcaggaggcgctgagctccatcctgggcatcctgaaggccgtgaacgactccatgcacctcatcgctatcaccggctatgacgtaaggcgcccagatgcccggtcttccccgccgcctccgtggaatacaccagcccagcaacttggcggcctccctgcacacgcccctcgctttggtgtgaatgtgcaggttctgggcaggaggtctggggtggtccctagataagcccactcccaggccccacagccgggtccacagaccccacagccgggtccacagaccccactgggctctctgggacgtggagaaaatcaggaagcgtcccttgcttggagggcacgcatctccagcaggaacgcagctcagacctcctcactccttgtcttctcctggggaggaggcgtggctcggagcagacgtgacttctgttttctgggctgcgatttgcaggctggtgacttagagcaagtggccccagaaggcagatgtcactttccccgtagagccccacatcaggtcacagcttattcatcttttgtccgtctttatgtccacccagcactcattctcaggtgttttttttttaactaatagagttgatttattgcagcaatttttggtttgtgagataattgagtataaatcagaggccctgaggcttcccctagtgttgacatttagcatgggtgccacacctgccacacatggtgaactagcgctgatgctgattagtgactgagggccgttccccttggagctcactctgggtgctgtgcattctgcggtttggacaggcgtgtaacatcctacacccagcgctagagcatcacacagagcagcttcactgtcctagaagcccatgtgccccgccagtccatccctcctcccccagcccctggcacctgctgacctgtcagtctccacgagcttgcctttcctgggacgccctgcagctggaatcccaccgtgggtgggctttgcagagtggctgctttcactcagcgatgcgcgtccatggccccaggcccatcccgtcctgaacacagccctgctgtcgcacatttaggggaatctcggcgacctgggcaagctgctgatgcagggctcgttcagcgtctggaccgaccacaagaggggccacaccaaggtgaaggagctggccaggttcaagcccatgcagcggcacctgttcctgcacgagaaggcagtgctcttctgcaagaagagggaggagaatggggaggggtatgagaaagctccctcctacagctacaagcagtccttaaacgtaagtgaggccgggtctgcagcagcacgctcctggccacagaccccgacgggggaagtctgtaactcggtctgaggtggccacgctgacacccagctctcagccttaggtgtaggggtggggtattctgccattcttagccctcacccccaaagtatttccatcatttcgtgcctgcaccaacaccttttaaaaacaaggcagtgggttcactgtgcacgcgaaccccatctccactctctgctcgcagatggctgccgttggcattacggagaacgtgaagggagatgctaagaagttcgagatctggtacaacgcgcgcgaggaggtctacatcgtccaggtgggccacccaccctacccctggcctcttacacattgccacgaatggtttctcatgggaaccagtgcaaggatctgccatgaagttgcatcgagcccaggagcagccgctgtacacttcaggatgctgccctgggctgtcttcaccctgagctggacccagaatgaaatgtggggaaaagtacacatcagacggggtgctgcgaggaaacgggctctccctccccaggggagctcatgtgtccctggacggtgcaagtgtgcatctggcacgcagggccgattctcacggtggggagggtgccgtgccctgggtgccaggcacagttcttcagtcagtcccgtgcatggggcacagagggtcccgcaatgcggggccacccacagtgctttcctcctctcccctcacacgcagccacctgacctttgactcctaagattatctttggatgttccgagagtgaaaccaaagcgtgtttcctcgggggcctgagtactcacctcctggcgtttcttttggggaaacaggcgccaactcctgagattaaagccgcgtgggtgaatgaaattcggaaagtgctgaccagccagctgcaggcttgtagaggtgaggctgtcttcaagcgatcgtttcccgtagcttccgctccaggtgcatttttacctatgttcagagcaaccgcacagtccccccatgcgcaaggtgcctcggcgttgaagtaaagacgctcgttcacgtggtttgtctgctccctcctcgcagaagccagccagcaccgggcgctggagcagtcacagagcctgcccctgccggccccgaccagcaccaggtgagaatggacacgctgccgcaggcctgcgtttctggagcagtcccgagcaggccatttgcacgccagggtcctcggcctctgtcagtgggaccctgtggttattggggttttccttgaggcccctggtgtttatgtgctgacgggtccgtcccagagggtgtacttcacagatgtgtgcctccgacaatgcccagtccctctccagctcttcccggggtgggctgttccacagcacggcagtgcgcacatggcctgtccagatcacagccacgccccagcactcctcagacagtcggggctcagctgggagccggcactgatggcccagcacacacgtgggcacgtttcagactccgaccctgaccgtggcttcgtcgtgtctcttctgcccttgttttttctttattttgttcatccacttatttttttcactttatcctgtttcttatataagctacctttaatcattcatggaacaggatatggcctaaataaataatccgtagaacagtagttttaaaaaagaaacactcccccgcccccccccccgccccccgaaaaaaaaagcctcatacttcagagcaagtagggtgggcgtctgttctcatccagcccgtccgggtttaacttagaagtgtgtggcccctcagaagcaggagggtgggcatctgctctcatccagcccgtctgggtttaacttagaagtgtgtggcccctcagaagcaggagggtgggcgtctgctctcatccagcccgtccgggtttaacttagaagtgtgtggcccctcagaagcaggagggtgggcgtctgctctcatccagtccgtccgggtttaacttagaaacacgtgcaggagatgctgctttaggatcaggccgggagctcagagatatctgaatgcctcaggtcctcagggcgttctgaaagactaaccaggcaacacactatttcctttttgatttgtctgatgtcatcagtccctcaagaggaaactcaaggaacatcaagaagctggaagaaaggaaaacagaccccctaagcctggagggatacgtcagctcagcgccactgacaaagccccccgaaaagggcaaaggtgggtatgtgcagggaccgggcctcacacggaggcctcacacggagctgctcacggagtgctcactgcatccgagaaacctgcgcttcctgcagtgtgaagaagctttgcagagcattcagggccccttgctcccctcttaacagagccctaggaccccacagaagagcccctccctctccattgctctgcacccctgcatcagcaaggccagccccagaaggagcctcggccgagcgtgcaacccggagccgccttgggccctccctgcgacagccggacccgcctccgcatcgggttgcgatgccctctgcatagtttctttctcttccttcatagatgacacggtcactagctctgcctcagaaagctctgcgctttccagaaagcgctttaccctgcagggttttgctaacctcaaaggtcagaaaggtaaaagtagtgcctgccccaaacccaccctcaccgtggtggcgtctgtcatgcatcgtgtgtgaccattcgtgcctccttcgtcacaagggcggccacgcaaaagcgtttctttccacccaatcacgtgttccctgatgctgtgtctcgcgcacagacaccagagttatttagaggtggctttccttcgggaaaatgaaggcgagcttttcaaatggaggcttgctcagaaacggagctgtccttggctttccaggccccctccttcctctccctgccccccacccccgccttctcccgccttctcaggtgagttccctgcagggtgctgaccttgctggctgcgtgtctctgctccgcctggtggcagaggccgctcagccatcttctggggcatccactagtgaacagggctgatgggacccttgagacggagacgtctaatgccctgctcacctgcgagagctccatgatgggaaatacatggcggggaaatgggcccaggaggccctggaagccggccctggcgtgcaggcggctcttctgggaagccctgaaggccagcgtggacaagggctctttccagagaagtaggagtgttttccaatttataaaatgcttttaagttggcctgagacttgaaacaaacaaacaaacaacagattctggtgctgcaaactctgctagcgcagaactaagaaaacgtccctagagacgggccccgaaaggacgcctctgagtgccgcagcccccactcccatgccctcccggcccctccttcactgcgcggcccctcggctccctgtgttttgctcacagaagctcctttttcatcggtggaaaggggccacaacgtcggtgtccccttccagcacgagcgcgggtcagcctcctcgccgcctccctccgtccttcacactctctctccggttgtatttctgcctcctcctcctcttgcagcttctcctaccagtcctgacaaaaaagccaagcggcatgaagtaaagagcgacccgactccctttggtgtgcgaggtagagtggcaccctcgggcacggcacccactctgcgttggcaggaagcgcggcccagctggctgtcaggtggccgtcaaggccacctaagggggatgctctcgtgggtctttatgctgcggaggcagacacgcggttgtgttcaatgtgtgatgctctggtgacaggtcctcgaggacagcacgcctctcagccaactcctcacagcaggtctatctggagcctgcggaactgcccaccccgtcggtggctgctggccacggctgctgcgctggtcacctggccgtgctgggtggagctgggtggggtctcactgcccagtggctgctgtcggctatagggcaccctgttccctgcccttccctgtggcacagtttgccccgacacttcctgctgggaacacagagcatagcaactggcagggccgacccggaccctcctttcccggggccaatgaggccgagctccctgtccgacccggaccctcctttcccgggccgacgaggctgagctccctgtggaacctggcccttctcgtttcctgcctcccttatattctcagggtgaaaactgccctgtgaagcccagagacctcccctggcctgttgaggaccttcaagtgcagggacggggctcatgtttgcaatcttgagttttcaaaaatttgcaaaggttcccaggggtgtaagcagaaccagccttcccattccgcccgcctccacagcctcctcacatgacacagcgagcctcacagaaccaggcagaagctgtggccaccctgggcatgagttcagaggcagggagctggcccggcgttactgactgtcctgcctgcaagtgggtgggcgcccggcttgctgcttcgaggccccaggagtgcttgggagaagggagtcatttccctgttgacagtctcctgggagaggctattcttgtctgtcaaaccctctccgcttgtgaactggagtcggcagagccggtccctggtggagaaggtgggccgggtgggccctgtgggccaaatgccgcttctgctgcactttggccaagctcagcctctgcttccgtctcgtcatccatgaatgaagacagtacagccttgcagggtctcgagaaagccagtgtggtgttgaagccgggccactgcccgtgggtcatttccaccgtggtcagtgtggtgtcagagccgggccactgcccgtgggtcatttccaccgtggccagtgtggtgtcgaagccgggccactgcctgtgggtcatttccaccgtggccagtgtggcgtcgaagccgggccactgcccgtgggtcatttctgctgtggttggtggtagtgagcccaggtggttctgggtggcctgagcgctgcccagcacccactccccaagccctgcaggtggtgactccaatgagcaaaggccaatggctgttttacagaaaacagagggcaccttcctggccatcacccggcctcctgccttcacacagaatcccccagctcctggtgcagcagtgctggcctggcctgtggctgcccactcccaggcactgccgttcccatcatggtcagacctctgcgttttgctgttggcctcccccgcgccctgttccagcacagcgctcttgatggcccgcagagaggctctggggagcactgagcacccacggccagggcagctcaagaatccttttgtgtctctggtggtgccaggggcagagtcgcttgggtttcaccccgcacaggccggcctcgctgcccctgtggacaggttcgtgtgtaaggtcctgcccacgccacaccagctcctgtgcacacacagcagcccccctttttttgttcccactgtcctcaatcagacttttggttctgtctggccagaggccccacgtgcggtgcctcagagcgactgggggcctggacggggagggcacgctggcagccaggccccacaggccagtccctgctgctgtagaggaggcacctgggcccccacccttgctgtctctcagcctcccttgctgggggcagctgcaggtgcactcaggaggccaagctgcaggtctgcaaccggaaaatcacagtcctcaattctcacacagatgcaggcctggtgtggtgcctggaaggctcaactgcctccagctgtgaccccaagaaggcaaagcacccgggtggggtggaaggagcagccccgtgctctgctggctgacagtggtgcccaggcccagctcccttctctgcacagacagcagagttccgcttagcacaggcttttccttgccagcgcagacgctgtcagccattggaactggcctgcaagacagcttgctgtggcggctttgcaggcacagggcacacaggcatccgtgcacgcagctcctctgtcctccccatgccccacaccctccatcgcaaggaaacgcttgcttccagtggtaccaaataggatttggaaccagtttgtgcccaagctcaaatctcgttagcatctgcctgtttccctggtgtgcatgtgtcctgcctcgatgcatttggcagcaggtgggatgcgctgggcctgctgcctggttgctggctttgcgtgtttatttagccccaatggcgtctcccatctcccccgcatgggaaaggccggtgctgccctctgggagcctggcaggaggaacactgggttggggaggggggcatgtgtggtcccaagtctggaagaagctccttcctcttctcccgctgggagctgcgtggccgatgggagcccatctccaccgcggcacctgcatggtctcagccttccggttcggtgccgctgtgccgggggctactctcttgccagtggggaccacagccctcggtatcccataggtcaagggcgtcaggccctctcagtgagcttcagtcattcactttagaaactgcttcccggctcggtctgctaggtgttgaacatgaccgtggcactcactgaaaacacctgcctgggagggcatctgcggcaggaaggctgcttccctcctggctgaggggcactgccctgcctgacaagggcgtggcttcccagggcctggggatcgaggtctcccacagggtggcccagcaattggaagcagatggtctcaaaccctgaaacgtgccaggcattctggaagtttgcaggggtgtcctgctcagctctttatgaacccgggaagatgacaggctctgttgggggcccacggcacacatttcagggggtctgtgggacttagctgaccccacctcagacagatgcagacagcggctcatcaccggggggtccctcacgggtgtctgtctctcttaggttggagcaaaacgtcccactcactggaggcacctgaggacgacgggggctggtcaagtgcagaggagcagattaactcgtccgacgcagaggaggacggcgggttgggccccaagaagctggtaaccacggcttccctgtgggcacttggggtgggggctgccctccggggattaggggtgcttctggcaggtccacccaggcttgggtcttaggacacagccccagctcctcctaaccctggaaggtccacatgggcctgggtcttacgggcagtgccagctcctcctaactctctctggaaggtccacccagacctgggtcttggggcacagccccagctcctcctaactctctctggaaggtccacctgggcctgggtcttaggatgcagccccagctcctcctagctcctctgtctcagcagcactttgtgtttctgggttaatttccaggtgcccacccagcctcctgtagagcccactcgtgggtgcaccttcctcagaggagacagtccccacccccctaccctttatgtcatagaatgctgtcactgagccttcctaactatacatacaattctcattttgtaagaaaatggaactgctaagcatggatttgcatttgaaaaaacattcattgttaatgtcagaagcaagaaaaagctgccatgtgttaatcattccagtgagggttacaccaagaagtgtctgctgcaccttctgtgctgtgcgtggtccatgccccaaggctggaggtgcaaaggggacaggtcccggaggctctggaagggcagagaagccaggcgtggaagggtagggagagccctcggggcctctggcctctcccacagagacagcatgaaggaaggcctgggcgtgagaacagatgtgggggacacagaggcggaggccacgtggcaggaggggaaacaggctggtggaacagggtgcacggggcctggggagggatttggatctcattctttgtggggtgtggggagtgatcctggctactctgggcaccacagaggcaggagccagtacaggccatcacgtgagggcaggcagcccagtcaccgtcctcttgctccaggccatcatgtgagagcaggtggcccagtcaccgtcctcctgctccaggccatcacgtgagggcaggtggcccagtcaccgtcctcctgctccaggccctgcagccggcagcacccctccgcagcccaccacacgcagcaccaggaggctgtgaatctccccactctgtaggaacagctgccgcttcctgggtccccattccccaacggaacgtgttccatgacatctgtgcagcatccgctgtgtgccaggcacagttctaggccccggagacaaagcgggaacagcacagacaggaacctccactcttacagtgaggagagaaagaggagtgaggcttggggaggttgggcaggacagctgcagggagagggagggcagaggacgggcgagtcggggagtaccaaggaaggcctcagcaaagcagcatggaaataagacctgaaagcacggaagggccctccgggaggcgggtatgcaggcgcaaaggccctggggccgagagctgtgtgtggagaccagcgtgaggggctggggcagctgggcccaaagacagattcacagacgccttccatcgccgctgcggtagtcatgccctgcggcgtagcctcctcccaaggctggagcccttccccggagctggtcgtggccaggagctcccaccggggcagggcgctaaggcccggcactccgcctggctgctgtggggctgctgccggggcgggtgctgacgctgtctgtgcccctgcccgtctcccaccaggttccaggtaaatacacggtcgtggcggaccacgagaagggaggccccgatgcgctgcgcgtgaggagcggggacgtggtggagctggtgcaggagggcgacgagggcctctggtaagaccccgcgctcagccccggactgccccgcacgtggctgccgctgaccctcgccccttgcaggtacgtcagggacccgaccactggcaaggagggctgggtgccggccagcagcctgtccgtccggctcggcccgtccggctcggcccagtgcctgagcagctcaggtaaggcccacgtgccccgagcccacccgtgacgctgccaagggcccgggcgaggaagctgccccgtgtgtgcccggcagagccgacgccgaagcccgtccccgcctgatctccccgcagagtcgagcccggggtcggccgtgctgagcaactcgtccagctgcagcgagggcggccaggcccccttctccgacctgcaggggtagcgcggcctcggcgccggagacccgcgcgctgtctggggctgcggtggcgtggggagggcgcggcccccggacgccccgaggaaggggcacctcaccgcccccacccagagcgcctggccgtgcgggctgcagaggacccctccggggcagaggcaggttccacggaagaccccggcccgctggggcttccccggagactccagagcccacagaggaggggccgcagggaacagccccgggcggcaggcgccgggcagcggcatctcgtcctggctccaccgtgctgcttctgcctctggacggtgctttcaggggacgcgcggaccgtggtggagctgcttccggagaagtggaggatcctctggccaacggcctgaggagagcggggcacggggtctctttagcttttacaagttttaggattttttcaagcagggatcaatcccgtggccattttttgtggtactttggcctcaattcttcaccaggaatcactgtgtttacatgaaatgacaatttgatactgtatttgatagaaaactatttttttgttaccggggtttacatagaagcacgttgtttataccactaagtgactttgggggggctctcccatggaaacggatggcactccctgaagctccctggtcacaggtggatgaaaacgtgtccgtgggtgacatcaggtggtgtctccaccaccaaaagcagttagaagccaaggagattcctttatctacctagggttcattttcaaaagaaaatttaaactataatttaaacaattaacgttcttttctacaaaaaaaatgcagggacttgatttttttaaagagcttcactgaattaggatatttttattgcttttaaagaaaatacaaagatgcagtttctgcagggtgtggcgtggaccagtgctgccgaccatagctcagagagccctgcccctgcctcactgcactgcagcctcctcggaggccgcacctccactccactccccacgcgccccctgcctcccacccaggtccacctgccacctggtgaccaccttgagtacagaagtgaaagtggggagagtattttattcaagtcacagcagaactggaaaaaaactcttctgttttaccaacttcttgtgtttcagaaacatattctgttcaaaacttttgaagccctttcggtgtctagtctgcagatgtttttgtatgtgtgcacctctgaccatgtgtgtacatatgtgtcttgctggaaaggacatattcgctgtccccgtgctgctgggagggccgcctcacagcctcacggttcccagccccagcacagtggaggcaggcgtggctgcattcccctcacgctaccctcccagcggcttgtagccgtcactggccagacctccagggtgcggaatcaaataggaagcatgcagagactcggcagcttttcctctgatgtgtaagttatttggaacgcgtgctgtgtcccgcgatgtccctgatgtactgtgcaggcgcggtgcctccgtctcgtcgcacagctgcgcgcccttgtgtgaccctccccataaaggcactttacagcttcatgtttcatccactgtcacttttttttaactgctgatgtaaatggaattttaaaagcagagttctttattgtatggatgacgtttgaataaatatcagcaactcctgccatctgcctttgtctgtcaagacacagaacgtctcagcagtcggggtttccagggccgcagtgcactgtgcttgcacatggtaagtcattgttgggacggaaaagaagccggcagtgggcagggcccagcgtgcggctcaggcaccgagcaaccgctttgctttcttctgtcagacggcgatgatgacaaaatagcaacaaggttgtgcgtgtcagaaacgcaaaggcagcagaggaagcgtagtggaaccattacagaatcacaatgcagccgacactctccagaccagaaaagggagcataaagaaagggtattgatccaatagaagaagggaagggtggagaaaggggaaagcatggttaacaggaaacaacatgtaacggaagagacagcccagatgtgtctggctcacaacagacgtgatcatgttatgctggcctggaagagcatcggatcagacgtgacaagtcactgcttagagaccatcaagcaaatttatatatagattggagatttaaaataaaagaagacagaacagacaaacaccataagaaagctggtgtagcagtatcgatgacctgaaatgggattcaggacagttcatagagtaaagggggctgcgtggcaatcaggaactcataagccactgactataaagctcaaaacacagcaaagttggcagtcggcagacagcaatgttgactgtcatgaaaagtgatccctgtttgcccctaaacgtagagaaatctgcgttattttccagcacacatggagcacaaacaaaatatttgcaaaacaatgggaagatcattgaaacactgtttggcaatttaaaagcttgtttctaactcacgggatgcgggcagtctgctctctagaactggacagcgtgcacagagccacgggagggagcagccacggccagctcagattggtgtcgacagcttagtggtgtctgattttatacatgacaaaatgaacgagttaaccatttaagccaaaaaaataagactagcgtaacccaaagaaagtatttaaatacttctgtcaattaggacagttgagaaaagagaataacaaaatcaaaagcaaaactcaaactttgtacctgaaaaatctaataaaactgactaatttatagaaaacctaagaaactccatatcaaataaaaaattttaaatatgagagaaccattatgaacacctttctgccaatatatttgaaaacagataaataggatttattgttagaattggtcaagaagaaatgaaatacttgggttgatgaataacagttacagaaattgcattgcaattaaaaaaaaaattaccccaaacagataccagatctaggtgattttgtaagcatacaaacatatttataaaagctatttaaaagaatataacaagagaaagcaactcaataaagttatgaatcaaatttaaccttggtacccaaacctgacaaagattatgtaagaaaagaatcagctgggccaggtggctcacatctgttcttctagtactttgggaggccgaggtgggagagttgtctgagaccaggagtttgagaccagcctgggcaacattgcaagacaccatctctacatgaaatttaaaaattagccgggcatggtggcacatacctgtagtcccagctacttgggaagctgagaccttacaagtgagcccaggagtccaaggctgcagtgagctatgatgatcatgccactgcactccagcctgggcaacagagcaagaccctgtctctcaaaatcaaccaaacaaaaagacaatgtaagaaaaaataaaattatgaagatgaatgcaaaaattccaaatgaaatataattaagtaaaacccaattctgtgttataaataaaggtaatactttctaagcaagtaaattcatcccaggaatgcaaggggtagtatgttaatgtggctataatttgccatattaatgaagtgaagggtaaaatcaccagcttaacaaatgcaaaacaataattcaatttttattcaacatgtacttgtcatgttaggccaactaggagtagaagaaaatttctttaactaaataatatgtatcaaacaaaatctttgcagcgaactttttttttttgtttgtttgtttgtttgttttctgagacggagtctcgctctgtcgcccaggctggagtgcagtggcgcgatctcggctcactgcaagctccgcctcccgggttcacaccactctcctgcctcagcctcccgaggagctgggactacaggcgcccgccaccacgcccggctcattttttgtatttttagtagagacggggtttcactgcgttagccgggatggtctcgatctcctgacctcgtgatctcccacctcagcctcccaaagtgctgggattacaggcgtgagccaccgcgcccggctgcagcaaaaattttaagtactgaaatcctttagaaccatccccattggcagcagaactgaacggggccccactactctccagcgccatttagccgcagtactagtgactaccaccgcaaaggaaaaggaaacaaggccagcgcggcggctcaggcctgtcatcccagcactttgggaggccgaggcggcagatcacgaggtcaggagatcgagaccatcctggctaacacggtgaaaccccgtctctattaaaaatacaaaa

SEQ ID NO: 359 - DNA, 10718 bp, Homo sapiens
  source 1..10718: mol_type = genomic DNA
agcccccatcttgaagctctctaggggctctcagacaccagccatctcattagcacatacaagacactcttagctgtgtagtggctcaggcccataaccccagccacttgggaggctgaggcggaaagggaggattgcttgaggctgggagttcaaaaccagcctgggaaacatagcaagatggcactcatcactggttagagtccaaggattttagaagccagaagccaggaaccagagacaaagaccaaatatgtatttcttatcatgccacacacagaattatctaattctctatccttactcttcatagcatgtatatatttatttgtttggtagttatgtcttcccaggagaaagtaagatccatgagggcaagatttttgtgttttgttattttgctgtttacttagtatctgtattactaagattctcggtaataatcaataaatatctgttaaataaacaaatgaatctaatttgtaaattctactactgctaactaatttagtcacttgtgccattagtccacaagatgacgccccaacctccaacctcccaccccaacccctgcctcagaagtgaaagatacttaagcagttcaagttaccaatggctaacatgacaattacagggatataatcttaaaggcaggaagaaatgtaattttaaaaactccagtcataagacatacagaaaaaaacctatatattgaaaactttttggttatttgttattaaagcattataagaatactcattaaggagagaggaaaagacatgacaagctgattgttttgggggacaggttaagaggttggagggaagtgattttttgttttttcttatcccgaactgtggtaactttatatttgagctgatgaaaaaaaattctgggccatccactgtactttttaagagtccatttgttagacaaaatatgaggaaatatggtctattttatcagctttttttttggtttctaaatggctatttaaatacagatagcagtacatacatgacaaactggaagagcaggttctgccacgctgccaagtcacctgttacctgatatctcctctcagagggcagaaccagcaatgcagtgtggcgtaacacagctggaaacgtgcccaagctgggccgccaagtgcaagaagtagacttcatgttaagaactgtgaaggtcaggacaaatcactacttgacatatgccactcatataatttcagaaatgagtaggaaaaagaatcccagacaaaagggaatagaagtcaagtcaaagtgaaggcacactgactttttatagttaactttttcttacaagttatataaatcaagccaagaaatgtaaaatatgattgtgcaccccagttttatctgtgcagttcaaataggtagttttactttgatcaagacttccacacttgatttctggcaaaaaaaaaaaaaaaaaagggaacactctttttcatgcggtatatgctattttcttaaaacaatatatatttctcattaacactgtttgcttataggtggttattctatttgcacaaatagaactgtatggataatgaatataaactgttaccataaatcttctaaattatatgaatgatcattacaaacaaatgtgcttagcacctattttgttgatagcccattgcctctgagaatctgccttttcctaagacaactgtttgggttacctctcccgatttcgtattctggccaccaaaataaaaattttcaatagtaacaaaattaggtgtccttttaggacgagggaagttgagtgatgtataaaaacattcacccagaaaccaggcttctgggcctagagtccttaagtgactagttaaagtgattgaaaggttccagtgtttcccattgcaggaaattacttaatctcttagagccttcttttccttcttataatattagagcattacataattataaaagtaactatggtttctaaatccttccctgctctaaaaatacataattcaaagctgctaaaaataaatacttttaaaattggctgtgacatatgtgacatatacatatataaacagagtttcactgtgacaaggggaggggctatacaatgttttgtagcagaaatttacaatgcatcggtatcaagatgcttttgttcctgaaaaagtgtttcagggtggcattcaacctgaaggcaaagttctgggaagcccccaggcacttcagtggaaacacagggcagtgttttgggggaccacatcacagctcaactggggacccagcggaacttgtaacccccgttggctgttctgatggtgaaggcattgccctgggggaaggcgagggtgcggatggtgctgtggctgcggatgcgggtgctgaaggagccgccctcctccagctcactgtggctcaggttcaacgcgctccggctgcagtctgtgcgcagcccccggaaggcgccatgcaggttcccgggcctggtgtcagtattcgcgggctctggcagcagtcggggccgcttgggatcgcggctctgaagggcttcatcgcagcgctcggaaatctccctcaggatggcgtccacttccgcgcaatcctgccccgcagcgctgaccaactcctccaggctccttttggccttcgccttgagcaggaagggctcggccgccgccccacaatcccgggactgtgtgatcatcagcttctacgaaagacagggaagagcgccgccctggggcctgccggaccctccgggttcggagcgtgcaaaaggtgacctaggcgcgctacgcaccacgcactcagcggtactctcctctcccgggcccccacgggtcccgatgctgggcggggatgcactgaactgttcagttccgacgtgctgcagttcccacacgcccgcgccccacttacatccagcaccgaggccaggtgccgggttcggctggcgagttccttcagctgcacgttccgctccttgagcgaggcgatctcctcctgtttctgggtcaatgtcacgtgcagctgcaggaggagacccaaacattcaggggtaggtactgtgctgggtctcgtctgcatatctggcatgaatcaaacccagatcctgacgtctcatcaggaactggggacgcacaggcatttacgctagtgagaataataatcaatttactttttttttaaaacaaagcacttggacaaaatttatctccattaatcctcggtgtagcgtgctgataaagagtactgacttgggcaacaggcagatctaggttctgtcaccgaagttcaacaatcctatgtcttgatttccttgtaaaacggggctagtaagagtatctagctcaatgattgtgagcattaagtgggaagaaaaagtataaattggtaagtccagggccagacacatagaaagccttcaaaaaatattggcgtccctattaaaaatctggcaggcactatgcaatatatgtatgtaacacaactgcacttgtacctctaaatccccccaaataaaactatttttaaaaataaataaaatggccaggtgcagtggctcacgcccataatctcagcactttgggggttgaggcagacggatcacccgaggtcaggagttccagaccagcctggccaacatggtgaaaccccgtctctactaaaaatataaaaattggccaggtatggtggcatgcgcttgtaatcccagctacttgggaggctgaggcacgagaatggcttgagcctgggaggcggaggttgtagtgaaccgagatcatgccactgcactccagcctgggcgacagagcgagactccgtctcaaaaaaaaaatgaataaataaataaaaattaattaataaaataaaataaaaatcaggtggggtagaattattcccacttaaccaatttggaaacaggtggagccaccggagcaatggcagctacgtgaaccaccagtcagtccactggttccgactcacaggacctcatcttctcccttgcaaaccccacttccaccctctatatcctgtccctgccccaggattcctggtcgccagaccagtgtccctacttgattattctcaacaagcgcgtctcccaacgctctctggttctggtccgccacctccttccagtattgctcaggcgggggcacgtctggagggcgcagcggtggtgactgcagggcccgtgggtccagtggcggggagaggcagggcccgaatggtgatatgtcgcaaggagagaaggggaagtctccgctggccagggtaggcgacatcatagaggatgagtctggagaagagcaggagctggatttgcagcctcaaattcatgcccagctagttacaggagcaaaatgccactctgggtgtagggtgtatgtagagatttttctttattaaattaagcacccttactcctaaacgcctgattacgaggcccttcctgatagcctgtacatacacagcaggtatccaacatatgcctgttaagtttacctgaattcaatcaagaacacttccctgggcctgcacgtcacacaggccttcgataccctgcacactcgtcactcaacctcccctgccacaccacagcatagggctccctctcccagaactcacaccgatcccagataaagcgctatgtagatccagcggttcgacttctccacgggggagagaaatgtcctaaatatggaaaaggctgactctttgatgagttgctggagagtcgttgacagttggctgggtttaccaccttcacgaccacgaaatctgaactagtctgatttgggagtgggggacacccccgctgttatttaactgccaggagactgcacttgcctgaaatgagatcatccaccgtgtctctgaaatcttgcagattgaagtctgcttccgtttggtgggaatggttctgaaaaaaaccagaggtgtacactggttaacgagtctggcgttagaaagccttcaataaatattggcgtccctgttaaaaatctggcaggcactatgcaatatatgcacgtaacacaactgcacttgtacccctaagtccccccaaataaaacaatttttgtggcgggtccggaaccctttctagaccaacagacctcctcccgggctcggcggcggtctgctcgcacttacgtcgccagcccagtctcgtacccgaaaattcaagccccatccgagacagggaacccagcaggcttgcactgccacggtggggagcgggacgcacggagcacgacactgactgggggaagggggcagcagttcgcggctcctgcagagcagctgcgtggcgggaatgggtccttccaccggcggtgcggcggccctgcgccggctccgggcagccgagtagcccgccacccaccaactagctaagcagccgcctctgtgaagctcggcggttccctgtgcgcctgcgaaattttgactccgactcaccagcgaccggccaccgagccgccgctgtaggagctgagagcacgtcttgaacaccggatctttccacccaagacccgacagcgtgcaggggcctcgagcagtaatttgaggccgcgtttcccgccaaggtttggccccagctaaccgccccacccatgcaaccgagcgggaagaaagctgtgattcgaggggccaggagaatacgggaaaagcttctgttctgcgcacagccagtgcggcctccattgctctttcagtttcccaaaaagttgggagtactcttttctcgtacagccggtgcacctccaacattatgaactgtactctcccggcctcctgcagagtgtctgggtgtgtgagaggaaaggagaccctaaggggctggaggcgcataggccttcttgttcccttaattcatggacatttagagttgataaaaacgcttttacacagtctctcagttcatcctcataccagtgtgggaagcggcaggggcctaactgattcctctttgaggaagaatctgaagctcagagagttacccagtcacccagctctgaagtagtggaatagggcctcctgcctccatacttcatttcctctagcttttctctctttttaggaaagctggcttccaccgaagacagcactgggaaggggacaggagtctcaagggccatggtaagagaagatgcatccaatagcccaccagaaagaccttattatactgaatgcactgttgattcattcctttgcgctcatcatactgttatccccaaagcccttctttactattaaaatatttctgggaagaggaacttactctgcccctaacttcaaagaatgtacaagtatcagttttcccttgggagaaaagagtcaagcagggaggcctctagcacctctgccactagttggatgctgagactataagagaaaggagatgagaaaggaagggctgagggccccagacaagtcctggagcatgagtgctgccctggttgaaggggctcattcttcaataactggaaggtctcctcctgggtagggatttgagaaaagtctcatgaggagactggaggccaactcaggaactggggccctggaaatgctacctcttatgccaatccaggtgttggtccattctgaacctcaaacatttctagagcacttcctctctctgtccacctttcccagcaggaaaggaatggggaaatgtgatctgagtgtcccaggggtctccctgagtgtttctcccctgggggcctctttcctctgaactagctctgtctttcccaggaaaattcctggattttttggtccatctgatgtgagctctgtccttgaaacttcgaggctgggcatagtggctcatgcctgtaatctcagcactttgggaggctgaggcagacagatcgctagagcacaggagttcaagaccagcttgggtgacatggcgaatccccatctgtacaaaaagtacagacaaaccaaaaactagctggccgtggtgtgtgcacctgtagtcctggctacttgggaggctgaggtgggaggatcgcctgagcctgggaggtccaggttgcagtgagccatgatcatgtcactgccctccagtctgagtgacagagtgagaccttgtctcaaaaaaagaaaaagaaaataaacaaaatgaaactttgaattctacctccccaattagataaatctggcatttctccaactacaaatgcaagaaaaaaattctaacaaagagcatgatgccaaatgtagaatctgtatacttagacaaacatccaatgagagctgcttgggttttgttacttgcacaataaacatgctggggtaagggagtgacctaggcctctgggtcagttggaagatactcaggcattatctttccttatttgatcatccagatctaaaaagaacaattaaatgtcctctgcagtgcagtgcccactcccaactcttgccttaacaatctctgctctcagcagccacctaaactgagtgtctctgggctctagcccaaggttctaggaggcccttggaggagggctgagttttgctccaccagcactcccagttctgggaggtggtcaattctttgtagagttccatactgggcctgtctgcaaaccccagacctattgccagcaagctgaaactggcacttttcctgggggttgcatctgtttaagacctcctgtccctctgggcacttcatgtcctacccatgagccaggcttctggcctcccagacaccagtgctgggagactcccttctctgcctgggaagcgtcagcaccagcaagtggcggaagtgggatgggagcaagaagacaggttttggggaaaagaaaaaagtcaagtgcctttttgccccatcacggcaagtgactagagcttttcgaagggctgaacaggactttgaaaaagcgcccaattgctgaaggactgtctctgcagagaagaacattttctgcaagattacttccagagtcctttgtccttcctgcttcttccaactgcaaattctcttgctcttttccagtcctgatagagaagttatccatcaacctccactcttcttatatacccacggaatgaaaatggccaggaagggggtgttgggagaactgataggaatgcaacaggttcccagtgcgcaactttgctcccacccacccgcctggtctctcagtgcgcaatcttgtcacagctccaaagagtagatagggtgggaaataggaggggaggcctccagatgagcccgactgtatcaagttggtcaaatcagctccagtggatatgtggtcttcataacatactaggatgcaagtagaagttctgatctgggaggctcaggtgcctgcacaatgcttcccctcaccagctgagtgtgcctgcgctcccgacccgagaggagcttttggggaattaaaaccaccaccccggaggagggtttgggttgcgtgaaaccacgaggctccacgagaaggggaggtacctgcgaggcggccaggtcaccaccaggcggcgcgtcggacccgagtagcgaagagcagtcagcgaggtcctgcaggtctatggtggtgagggctgcgcggggagaccgggagacacgcgccgggcgggccctgagcctctccgccaggctcgcagctaggacgtcagagcccgggggagagaagctcctccgagctgtgcgcgccgcaccctcccggcgcggggaacccgaggggtagcgtgggtgccacggggctcacctggcagcgctgtgggctcggcgtccgggggatcctcgtacaccgacaccgggctcccgcctgtgcatccggggaagaacttccgcggaggagcgaactggccgggcacacaaacgttgaacgcgggtcagccctcggggcaccgagcgcgcagaccccgcccggcccgaatcaaccgccccaccttcctctccggcttccccggcttgcagagcagcgcccggcccggcagtgccagcattctgttggggcagatgctgtcgaaggcccgacggccggccgcgccgcccccgcacgcctgcattgtgcctcctgcctccgggtgccgactgctcggaggcggcggcccgggctggggcagcgatccacaccctgcactcccttcagtgcctgcaggctccgaagccagccagaggttggggcaggcgcgtgaccgagaaggagccgaggggctgccgaggaggtgctgagagatggcgggggagggggaggaccgccgcgcgggaggggtggcttgcgcctgagcgccagaggtggcgccttcagcccgggacaatctgcgcgcgggcggaggcgttaaacccaacctggcaaccgggcttcccccgggagccgccagcgcggggccccggcccgccagcgccgtttcggcgagctttggcgccgccgcctcccggacgcgccaggcgaagagagggagaaggaggggcgggcaaacgccggtctccctcgccctgggtaccgtcttcccgcttacagacagggggaatggcaaagttaacgattatttccttttcttcccactccagccacaaggcgcacgaaataaacgtggagtgacacccgccagcgctagactccggcctttgcgctcctgcaggatttagtaaggatgtagaataccggcagggatgccctggaacagcccccttattacagaagccccttccctcaaacctgaaccttatcctgggtcctgacttatggatttccacgtggtctcttttggcctgacgccaagagcccgccccgctccccaagccccgcactcttctcggcagtggcgcgtgagcacagcctttaaaagaccgtccgttaagaaaaagtgacactacgaaccctcctccactttctgaaaacgccacagtggaaagtaccgaatccccgaaaaccctgttcctgtctttcctagtggcctcagcggcccatcgccacgtttggctggtctcttcgcagtcgtagttgccattcccaagccaacacctctccaaggaatgggcattttcctgagtccgaggcatctcctagggaggggcatccttaggcgagggacctttctcagtaccactcatattcatccaatttgaacagtcgtctgaaattggaatctttgtgtacccacccccctatgttgggcaccttgttttccccttatacctagtagtcgtagtgaaagagcctctagtaagaaacaagataccctaacagcggtggaaggtaatccaatggtagagctggaatagagtgagagactctctgacccaggagtagatgcagaaactgaattgatgtgaggtcagccagctagagttggtgtggtatggctcatggtgaggagctctggctttagggtcagagtgcctgaggaccaggtccatgagccctaggtctttaggaaaaaaagttacactggcctcaatagagttgctgtgaagatgagtgagattatttatgtaaagtgactggtgcttagtatgggtaaattagtgattttttaaaagccttttcagctgtatttccagcttcccacaacttgttcctagccctgtctcctgtttcctctggtttctgagtagcacgaccactagccagtccatctccatctccatccccatcctcacccactttccagcctttaaaatgagtagggaagctcttagctgagttttggggcgatctccacacatgcagatcgtcacaa

SEQ ID NO: 360 - DNA, 240027 bp, Homo sapiens
  source 1..240027: mol_type = genomic DNA
cagcctgggcaacggagtgagaaactgcctggagaaaaaaaaaaaaaaaagtagaacctagacctgatatacaacctaaagcagtaatatttctagaagaaatcctaggagaaaatatttgtgatcgtggagatgaagaatctatcaaatactaaactttttttaccaccttgaccaaaagtaattggtttatatacttcatcatatcatttaattcaaaatctacagagatcaatgtcactttctcagtaaaagtacgtgagtcttcaatgatgccctgaactcacactcccaagtaaaccataacaccatatttccagagtagagtttattagaacaataactggtgataatgataaatattgatcaaagactgagcctaggaagtgggttttttgaggctgcatatactcaaggcaattcttcagaaccacagagggctcattggatcctattaaaagctgagagtgaatgaataaacagataaaacagagacctgagtagacggtagtcgatattcttttacatgtattctacctctagattccatagaaagaactaaaagtacatgaatttcactaccaacatctccatcagttaccagctgtatcaccttggatcagtcaggtaacctcccgcgaatctggttgcttccggggcaggggatccgcgggctgcaggtttgagcctggttgccggcagggtggagcagctggagggccaagcctttgagctccagggggggtggccgggacagtgggtagtgccagccgatcggcgtcctggggattgcctgaatgtgaggtctgggttcaccccgcggtgacctgagtcctgggatgcccctacagggatttgctgcctcagggatccgaagtctctttcattcccttactggggatttgaggtctggaggtactcctgcgggggtctgagatctcggggtcaccctgtgggggtctgaagcctcggggtccccgcgtggggtctgaggtatcagagtcccctccgttgggtctgaggtctcggggtcccccatccccgggatcggaggtccggctccccggagcaggcagggcggtgcgtctggccctgaacagtaacgtggcgcgccagccccaggtggtgtcgggctaggggggcataacggtgccgaaagtccgcacaaagccgtccgctggggtcccgccgcgtccgcgagggaatgactgtgccccctccccttcctgatcctcagctcaggtgagcccagatgaggcgccgggtagcttctaagtcactaatggaaatagaaggctaattcaggggttaggggccgtcgtcctccttactcccaggagaagagaaaaacccacggcccagcagccagaggcgcggcgaggcggaatcgggccccctccccgggggctcagctccctccagcctcccgcctcacctacagagaaatcccggaaacgcggattcagcggagcgcggtgacggcggcgcgctcaccccgcgcatgcccagtgcccgcgcgcgccgccaggctcgcaagcaccgcgtaggccagctggccggatcccgccgtctgtcatggcggcccccatcctgaaaggtgaggtacttcctgctgcctgctccagcagcgggagtttgaggaccggcacccctcgtcgcgggcgcactcgggggatcccgtgggaggagccccgctcgcccctccctcgctgcctgtctcccccagaccccctgccgcctccttcctcccccgctgcctgtcccaccaaaaccccctgctcctgctctctcccccgctgcctgtccccccaaaacccccggctgcctgcttcgtctcccgtgctccctgtccccccaaacccccgactgcctgcttcctcccccgtactgcttgtgccccaacccccgtgctgctagttcccctcaatcccccgctgcctgctccctcccccatgctgcctgtcccccaaatcccgcctttccccctacctgctttcacccctgctgccttagtccctggatctggggctcactggcaggcagagtcctgccctccggaagttggtgtggggccctcctgggtctggtcctgttcgaccccctctgaggcccacctggaggagcggcagttgagtttctatgctaattgttccaataataggagccgccttttactgcggagtctttgtgtgccaggcgctgtgcttaggctagtatggtattgtctgatttttttaaccgctctatcaactctcttatatcattttacaggcagaaactaaggcatcggacgtttaggtgactctccctgtgtgtggctagtcagtgctgacagggccttagaccggagctgctgtcctaaccagtatatgataccgcacgcagtcccaccctctgtgcacctggaagagcccaggagaggggaatagcggacacgtgtcttgtagagtttgaccgtgagaaaaaaggggcctgtattgtggggcctggagtcataaaacctcatagccaaaagtaaagactagaggctttatacaaagtctgtaatcagatgtggctatttttctaatgttagtattttgttaaattaacctggttttcttttagcgttacccccaatcattgaccaacggcacacctggaaaatgcttttaaacatcaggttttgagaagaggatatccactagaacaggggtccactcactatgccccccaggccatatctagcctgctgcctgtttttgtaagggtctacgagctaagaatgtcttttacatttttaagtgattttaaaaaaaggtcaaatgaaaaattatatcacattcacatttccttctccataaataaagttttattggaacacaggccggcccgttaatatattacctatggttatgtttgtgccacaaccgtgaagttgagtagttgtggcaaatactgtattggccacaaagcctgaaatatttaccatctgtctctttacagaaaataggtttctgcactggaaaaattaagcgtaagaatttggggaaagcaactaattttacaaatgtaaactctcatgtattgtatgggtacagttgttctttgcttaaaattttaataaattccactgaagctattttgaaaaggctttcagtagaaatttatttatgagacagagtcttactctcttgcccaggctggagcgcagtgatgtgatcacataatagctcaagcaattctgcttcagcctcctgagtaacttgggactacaggcactaccacgcccggttatttttatttttattttttaatttattatttttttgtagagccagggtctcactatgttgcctaggctggtcttgaattcctagcctcaagcaatcctcccgcctccaccttgcaaaatgctgggattacaggcatgagctactttgttcagccagtagaagaaacttcatttacttttcttatttttgaggcaaggtctttctctgctgcccaggctggagtgcaatggtgcgatcataactcagcttctacctcctgggctctagggattctcccacctcagcttctccaccctacccacccccatttcccacccagtagctgggactacagccactcgccaccattcctggctaattaaaaacaaaattttttttagagacagggtttcactatgttgcccaggctggtctcaaacttctgtgcccaagtgatcccactgccttggccttccagagtgctgcaattacagcatgagccaccacacctggccagtagagtaaatttttgttttacttttttctttttttttttttgaaacgggtctcgccctgtcacccaggctggagtgcaatggcgcaatctcggctcactgcaacctctgcctcccgggttcaagtgattctcctgcctcagcctcccagtagctgggattacaggtgcccgccaccatgctcggctaattttttgtatcttttagtagagatggtttttcaccatgttggcccggctggtctcaaacccctgacttcgtggatccacccacttccgcctcccacagtgctgggattacaggcgtgagccactgtgccggcctcggtttactcttaaatgtaaatagaacaaaatctattgggcaggggatgctggaatttcaaatgtatgtttcatgttcatatcttgttttcagatgtagtggcctatgttgaagtgtggtcatccaatggaacagaaaattattcaaagacatttacaacacagcttgtggatatgggggcaaaggtaagacacttattttgctgttgattcatatgacagtcttctgattggtaaaaagttacatttgcattttcttattttgggagtttttacttagaatctggacgaagcaatgggtaagcggtgggagaaaaaagagccaaagtgtgaagaatttagaacagtaggactttcagaactcaatgcctgtgggcattgagtgaggaggaggaacctaggatgaaatgctggattcttacactggttacttgaatgcatagtgctattaagcaaagtgaggaatacaggaaaaggaacaggtttctaagggaaaaattgtaaatttgggcatactgaaaaatatctgttagatatttggatatacaagtctggagcttggagtgttcaaggctagagatgatgatctagggggtcaggaccataggggtcatgtgaagtcacaggtgtggacatcgtcccatgtcaggcatggttaggatgaagagtggtgacagaggagcgttgttcagtattcaaggacaggcgatgggagcagggacccagtgacagagggagagaagaatgccaggagaaggagaaaggaagtgtggaagtcaaagtagggagtaattttttttttttgagacggagtctcgctctgtcgctaggctggagtgcagtgacgcgatctcagctcactgcaatctctgccttctgggttcaagcgattgtcctgcctcagccttccaagtatctgggactacaggcacatgccaccatgcctagctaatttttttttttgtatttttagtaaagacggggtttcaccatgttggccaggatggtctcaatctcctgatctcgtgatccgcccacctcggcctcccaaagtgctgggattacaggcatgagccaccgagcccggccaggagtaattttttaattgcctttcagaactagaatggagtaattttaaagatagaatttttaaaaactacagaaagttcaagaaaaataggatgggcaaatgtactttggatttgaacactgtaaggtcattgctgaacttagtgcagttttcagtgaaatgggcaggaatcattgagctatgaggaaatggagatagcaaacaatttgccttattcaaggtttcttagtatagccatctctgttatcagatttactatcacgtactgcttgtgttcaggtagcctctatttgacttaataatgtccttgataccaaataggtatcttttgcccacgcacactaaaccgatcactttgatgacgggttttacaaaagggaaaagattcattcacggggaagcccagctaggaggcagaagagtactcacatcttcattcccaaagataaggcttagggatatttatcagttagggaagtagggtgatctaagctgtggggaaaaatgaagtacatgatctgcacaagcatagttgggattcatggaatgcatgtttagaaaacaggcattattaggaggccaaggcaggcggatcacctgaggtcaggagttcgagaccagcctggccaacatagtgaaaccccatctctactaaaaatacaaaaaaaagccaggtgtggtggcacacacctgtagtctcagtgattcgggaggctgaggcaggagaatcgtttgaacctgggaggcggaggttgcattgagccgagattgcaccactgcactccagcctgggcgacggagtaagattctgtctccaaaaaccaaaaaaataggcactagtaggatccgatggtgaagattttggcctgatgtcaaaaggtcatttcttgggcatttacacaggcctggttgaagagttggtggttgcagcctgtttgaactgtacgggtgctgccccaagttcctgaaaagtaacttaagcaactgttaccgtggtgacatatccaccagaagtttttatcttataaggaagccagtgaaggttatagcatttagtagtatgacttgcagctatatagaaataaataaataaataacaaaaagcaagtgaccaaaagcaagcaaggcaggttaaatttggcagaactaattttcagccgtaaagtgcaagagtgatgatgctggcaattcagatatgccagagaagccttaaggtgctttaagtgaaaaggtgaaagttctccactttaaggaaaggaagaaaattgtgtgttgaagttgctaagatcgacagtgagaacaaatcttctaatcttgaaattgtgaagaactatgctactgttgcagtcacaccaaactgcaacagttacagccacagtgcgtgatttttattataatacattgctacaattaccctattttgttatcattattgttaatctgtgcctaatttgtaaataaaacttcattgtatatgtatgtataggaaaaaacagtatataacctgttcagtactagctcaggattcaggcatccactgggaggggttgggggcgggacgcgggcatgtcttagaacttaacccccgtggataagggggaactaatgtgctcttatagggagtttagttatgaacaaatcctgtttatgtccttgtctggcatttgggaggggctgactgataggctgagtgaaagagaaccattaaaaatgggagaaaagataatcgaaggcagggctaggttagggtggagcaagagagctgctgtgggtataaaacttaagaggcgctcaccaccaggcaaagagtgggtgctactgaataccctaagagccttgtttgacctccctaatgcctgtcttgagtaagaggtcagtggagaggaatccgaatataggagcagggcctgcactgcaggaggggagacatgcccactgtaatacactggaatgtaggaacccgagggagtctgcatgttgcacatgcctaacatttacttgggatgaggaggaactactgtgaataagaaaaaagccgttagacaagtgagttgacaaggtggtttgagggtagcattaagatcttagatcttttagaactttttggtttcaccttttatttcaaaaattggcaaacagttcaaagaatagtgaatacagatcaatagtcgttaacatcgtaagatttggatatttgtagtactcgtaatccgggattatcttaagccaatttcaggatttgagatgatttaaaaccagactacaggcctgtgagggtcattataacttctgattcacccttaatctagatgcagctctttgggtctcagcgcaaggtgtaggggttttaccagacccccttgtctctttgaggcttctcaattttcgtcctgtttagtgtgtactaaatttgataaaagccttgtgggaagatggtctcaaatgctagactcatctctctaggtgtcagtcttaatctagaatctcagcccggtaattcttaattgccttgatagctcccatggacttgatgggggtgtggaaattgagagagagagagagttataaaagtaatacatatttattgtttaaaaagactaacgggcagtgccatgaaattcacaatgaaaagaaagagaaaccagcaacgctttgcagtacatttccttttccatttttcaaagacagctactttcaaatcatctgtttcttttggtatttaccttcatatttccaagcattgtacatatattacttcagtataattgaatgctataaaaattatgcagatgagttctgcttctggaaaggatacataaaaggtaaaatttttgacaccatgagtgtctgagcatgcctttattatactgttacctttgactaatattttagctgagtgtaaaatgctagcacaaatattatttttccttgaaggtatttcccattgttttctcaattccagactgctgttgataagactgattcagttgtcacttattgtttgcatgtgatgtgtctctatcctcttcaccttgattacccactcttttaatatttttccctttcgccaaccatgctggaattctgtgataagcttggtgtagtgctgttttcgttcttgtgctgggcctttgtgggggattcttttgatctagaatgcatatcctttagtttgagaaacttttctttgattatttctttaataatattttctccattttgtgtattcctgtattctttaacttctgttgattggctgttggatctcctggtctgagcttctgatgttcttgccttttgtctcctgttgtccgtcttctggttcttctcttctactaccagtgagctttactcaacttcattgtctgatatttctgtagaaaatttttttacttatgtcatcttttcttaatttccaagagctctttaggatcctattaaaaaataatcttctgatcatgttgcgtgaatacagtatcttttttttttttttttttggagatggagtcttgctgtgttacccaggctggagtgcaatggcacaatcttggctcactgtaaccgccacctcccgggttgaagtgattctcctgcctcagcctcccgagttgctgagactacaggcacgaacctccacgcttggctaatttttgtatttttagtagagacagggtttttccatgttggccaggctagtcttaaatttctgacctcatgatccacctgcctcggcctcccaaagttctgggattacaggtgtgaaccaccacacccagtttcctttggttttaattagctgaatttttccaactttttgaatgattgcacttattttcaaccttcttactttgtatttatgcatttaagattacaggcgtccgccaccttgcacccggataatttttgtatttttagtagagacaaggtttcaccaggttggctaggctggtctcaaactgctgacctcaggtgatccacctgcctcggcctcccaaagtgctgggattacaggcatgagccaccatgcccagccatggatacagtatcttaagatatgaggtatttttaattttggttaaatatgtgttctgttttctctgttgcctctgaatttcatttggttttatttttttgatgtagaaagcttttctgaaatgtccattattatctgactctttccatctttaaaaatgtggtgccttctcatggccacattttctcttctgtcctctttatccttgcagggctccaactctattctttcagtaacacttcagagggtttttagagggagtagatgtgaacttgtgtgtatgattcaccgttgtaactggaacagatatgttttaagcagcgttatgcattcctttgagtgtttctctgtcagatgttgagaaacagaattgctggggtagaggttttttgatcagttgtagttaagttgtgaatgaacagtaatgtacattttgttttctgcattttgtctacaggtttcaaaaacttttaacaaacaagtaactcacgttatcttcaaagatggctaccagagcacttgggacaaagctcagaagagaggcgtaaagctcgtttcggtgctctgggtggaaaagtaagcagtttctctcttactttttttccttaagtatctagtattgaaaatgtgtggagatatttttcacagatcgcagaaccagataaagtttgattttcatcttttctctgcctcttacctcacctagtaatttgaaatcctccagcctcaatttctgtggttcaaaaatggtcatgctataatacctaactctgcctagggggaaaaggagcctgcaggtcctgaagctgggtatgcaaggtggacttaggaagcaagagggaatgtgatgaagcagattgtgttagtcagcaagcgctgctgtaacaaaggaccacagaatgggtcgcttgagcaacagaaaaggactttctcacaactctggaggcaggaagtccagtatcaagttgtcaacagggttggtatcttcttttttttttgagacaaagtcttgctctgtcatccaagctagagtgcagtagctggatcttgggtcactgcagcctcagcctcctaggctcaagtgattcttatgcctcagcctcccaagtagctgggattcatctcaacctttgcctcctgggctcaagtgattctcctgcttctgcctcccgagtagctgggattacaggcacgcaccaccatgcctggctaatttttgcatttttggtagagacggggttttatcatgttggccaggctggtttcaaacttctgacctcaggtgatccacctgcctcggcctcccaaagtgctaggattacaggtgtgagccaccgtgcgcggcccacacagttttgattacagtaaatttgtagtaagttttgaaattgggaagtacgagtcctgtaacttgtttttcattttcaagattgtttggctattttgatttgagttccttgctaagattgtttggctgtcttgattgggttccttgcatttctatatgaattttatgatcagtgtgtcaatttattcaaaaacaaaaaaggcagctgggatttggtaggattgtattgaatctctaattagggaagtgttcataatatttaatctttcagtccatgaaaatgggatgtgtttctttttcaggtctcaaatttccttcagtgacactttctagttttcagtgtacaagttttttaccccctaggttaaatttattcctaacttttttgttcattttcatgtgaatgaaattgttttcttaatttttttaagttgttagctgttagtgtatagaaatgcaggtgattgttgtatgttgatcttataccctgcaaatttgcttaacttgtttattagttctaaatatatttgtgggttccttagcattttctatatgcaatgttgtgtaattttgtaaatagagatagatttacttcttcatttctagtctggccgcatgttatgtcatgtcatgtcatgtcatgtcatgtcatgtcatgttatttgttctggccagaacctccagcacactgttgaatagaagtggtgagaatggacgtccttgtgttgttgctcatctttggagaaaagctttcagtatttcattatttcgtatgatggtaactgtggtttgtgtaaatgtccttttttaggctgaggacgttcccattcccttctgttgcaggttgtttgtttgtttctgattattaaaggaagttagatatggttgtcagatgtttttctgcatgactgatcatcatgtgatttttgtccttcattatattaatgtggtgtaattgaggggttttgtgtgttgaagcaaccttgcagtcctaggataaatcctacttggtcatgttgtatacgttgtcatcttgcctttttaattgttggaacaggccggatgcggtggctcacacctgtaattccagcactttgggaggccgaggggggtggatcacctgagattaggagtttgagaccagcctgatcaatatggtaaaaccctatctctattaaaaatacaaaaattagccagtcatgttggcgtgtgcctatagtcccagctactcgggagattgagacaggagaatcacttgaacctgggagacggaggttgcagtgaaccaagaccacgccattgcactttagcctgggcgacaagagcggggaaaaaaaaaaaagagtaaggggtccttctctggcttttgtcaagattttctcattatctttcactttcagaaatttaagtgtctcgatatggttttttaaaatttattttgtttagattttacagaacttgttgaatgtgtagttgcctgtgtttctacatatgattcgtttttggccattatttcttcatctatcttttctgccccgtttcctcctcattttttctgattagctgtatatctttttctaattagctgtataccagggattggtaaagttttctgtaaagggacagatagtcaatattttaggctttgcgggccatatggtctctgctcaacagctcagctctcttgtggtgtgaaaggcgtaatagaaaataagtaaacaaatgcttgtgtctgtgtggcagcaaactttacttataagtctggcaggaagccaggtagtttcccaatcctttctgtgtaatacaccttttaaacgtttgcatttgtccatagtgctctccttcttcttcattattgttcagtctttttttttctcctcagattgatcttttttcaagttcattgacttttttctccatcaaatccattctgctacttagtacctttatttgagatatttttgatttctaacatttctagttggtttttgtatacattctttttatttcggtttcatgtgagatttctcacctttggttttcctgtcttcggttatgagtgtattttctattacctcgatgagtgtagttataaatagttgtcttaatgaccttgtctgataattttgaggttggtatctgttttgtttttgtttttctttgatagtgtgtcacatttttctggctcttcatatggcaaataatttgaggttgtattttgcacgttgtaaatactatgtagactctggattcttttctattgtcgcaaagagcatgaggtttttgttttagcaagcagttaacttgtcgttaaaatgaaacgcacactgtcattatgtgggcagttgcttagatgcgccctttaagcctcaggtgcaggctgatttgtttgcctcaaacacatgttgttcaggggtcagccagagacttgaacttctatactcagaatttggggtttctcctatggttctcttacttcctgagtccttacctcatttctctagtagccctagctgcccagtctccttcccctggtctcttcagcgagaaaggaggccggagcttctgcttgagtgcttgctgcgccacaccagctccctcagagactgtggctgcctttaggggacagacagaaaaagtggtgatgcccagattcttttgcttccttttaaaatttgcctgttctttctttttcttttatttccctccagctttcaaagctctcacatagttggtttattttattttatttttcctgtatttccaggacgtatagcttatagttcacctatatttgtatattggtttgttaggcataaacagaaatggaacttagtatgttatttttgaagcatctgatgccagtctaattcttcttcccttcaacattatttgatctttttggagactccttagggatattttttattttatcattttttttttgagacggagtctcgctctgtcgccaggctggagtgcagtggcgcgatctgtgctcactgcaacctcctactccctggttcagcgattctcctgcctcagcctcccgagtagctgggatcacaggcacgtgccaccacgcccagctaatttttgtatttttagtggacacggggtttcaccatgttggccaggatgatcctgatcttctgacctcgtgatctgcctgcctcagcctcccaaagtactgggattgtaggcgtgagccacagcgcccggccaggattttttttttaagactcatggctttactgtaatatgttttgaattgatcattccagttctggcttggccttttcaacagattcaggtctatatttctgcaaaagtttctgggattatagttttaaatattctgcttcgttgttttgcttttcttctgggactccaattatgtttacgttgggcctgcttagctatcttttatttcagtcaacttgacttcaacccttttatatttatatacacatacacacacacacacacacacacagacacacacacacacacacacacacacacacacacacgcatttttaccccaaatacttatttgacagtatttgtttttgttttttgaagacagggtcttgctctgttgccgaggctggaatgcaatgactcagttgcagcttactgcagccttgacctctaaggctcaatcagtcctctcaccccagccctccctagtggctgggactgtaggcatgtgccaccatgcccagccattaaaaaattttttttttcttttttctttttgagatggagtcttgctctgtggcctagtgcagtggcgcaatctcggctcactgtaagctctgcctcccaggttcatgccattctcctgcctcagcctcccgagtagctgggactacaggcgcccaccaccacacctggctaattttttttttttttttgtatttttagtagagatgggattttaccgtgttagccaggatggtcttgatctcctgaccttgtgatccacctgccttggcctcccaaagtgcaacccggcattaaagaattttttttatagagatgggatcttactatgtaggccaggctgggctcaagtgatccactcactccagcctctcaaagtgctgggattactggtgtgagccactgcacccagctgataatatttgattcaagttcaagggttttgttatattcttcagttttgtgtttgcttttattttagggagtgtgatgggttttcctcagctgaaatgatttgctttttctttgtttttttaaaatagatttttaaaatggatgtagtctattctatttccattcattgcataggccaggcttgtggccagagcgtcctcttctgtcagttctgctgtcttgcatagtttcttttataggtgatgctggtgagggagggaggagggaggggctcgtgtatctcgtttgcgttttgtttctataggatccttaaatgtttttctcttagtttcttctttttttcactgccattggttcaagggctgccactccccccagaactgatgtttttcagagcctgcctgtcctagtcttgctcccattcagaccccttccctggagtgggtgctgtgagctgtgtgggttctctgttgtggcagttgtgctgggtgtcctctttctgagacttcttttacctgtgcttcatgtaagttctccaggctgtactactttttatggagtcttaagcgtattctccccgactttctgcatccatagacttgcagctgtgttggaatttgattatttttctacttataggtcatctgaatttgcgctgttatctccgtgtcagtgagaatgtaggtcatatgtgtcttttatttaagtttcttttttattttctgcttttttttcggggagggaatggggtaagactcagtatcagccagccatcattgttttctctacctcatcttcttatggagtccattgaaatggcttattgatttttatctcaaaatcgatctctcatagatctttatctctgctgttacagtcgagacaagtatcatgtcttgcttcagttactgtagcagcctcatgcctgtctgtttcattttgtttcttatacataagcaaatgtaaccccttttgttaccagtggaaggtatccaagttaccggcagcaaacacgtatgggtttgcagcaacttcagttcttgcttcctcaaaagaaagaattccacggaggagcataaggcaaaagaagagactgacgcaagggtcagagcaggagcagaagtttatttaaaaggcgtcagaacagaaagaaaggaaagtacactgggaagagtcccaggcgggcatggaggtctaatttgatgtttaaccttgatcctgggatttgtaggctcgcccttttccgcagttcttcccttagggtgggctgcccgcatgcacagtgcgggaattgagcacaggcagcttgtttaggaagttgtgtgggtgcccatctgaagctttcttcccgtttctccgccattttgtctcttaatgtgcatgcccgggaaatggcctctccctggcgtctgcattcagttaacactttagcacaacaggtgtggactgtcaggaaatggcctctccctggctctggctgccaatttatcacttttagagaggcaatgtgataattgttgagctatcacccaacattcctagtgggtggtagaggcctctcctgccgggcttatgcctaactacctgtaatacttcaacacatggatcagctttatccttctgacaaaatggcttagagttcagtggtctatagcagagaatggccaactatcatcccccagccaaatccaccctgccatactgtttatttttttttaatggcccatgaggtaagaatggttaagagaaaaaaaaaattcaaatgtttactatttcatgatatttacattatatgaaattcaattttagtatccataaataccgttttattggaacacaggcatgttcatctgacgatgtagtcagtggctgcctctgtactacagctgtagatttggatcctgtggcagagaccttacggcccacgaagcctaaggcattcactactttcccctttacagaagtttgctgacccaggtccagtgtgctgcatgatggtccccttcccttccattgtcagctgctcccctctcccttgtttgcgtcttccaaatgctctgggcttccacgtccccaaggctacactctttctgcctttagttcttggcctgtgctgagaactctgccccgtcttcctgattctaaacccagttttgtagtcagctcctttatacatgttgcattgcaaggtcgctttatcagaagagcttcctctgtccccagttcacagttcaagccctatttgttattctctgtctcagctccttttttcctgtgtgtactattaaaacttattttgttcatttgactgctttatctgtctgtgtatctaatcatgcattttgtctttctattgtaatgtggattccaagagcagctacctgtctgtcttatttatggttgtgtttctagtaagtctaacattcatctggctcatagtagatgctcagtaaatatttgttctaacaaattatgaacaaaggaaaatttagttaagtggcgtagagatactagagaaaatatcatgggggaaaatgatttgaaaaaaaactacattttaaaagtcgtatagaaatgtggaggggagagtgcagaaacagagacctttactagaagcttgaagtaaatggagatgcatggacaaaattaaaatagtagccatttctgtacctaatagggcctctcagctaaccctacaatggggatggtcactggtagtgtgttctgctgagagttagggattcttactctgctttgctggcccagcccctgactcattctctatcccctttctctctctctctatttctgcccaccactaaccccagcctttctcaaggggctcatgcagaccccataatacttgtaacttcgttatccaaaagcaaagttttctttttcttttctggagactgagtctcactctcttgcccaagctggagtgcagtggtgcgatctcggcttactgcaacctccgcctcctgggttcatgccattctcctgcctcagcctcccgagtagctgggactaccggagcccgccaccacgcccggctaattttttgtggttttagtagagacggggtttcactgtgttagccaggatggtctcgatctcctgaccttgtgatccgccctcctcggtctcccaaagtgctaggattacaggcgtgagccactgtgcccggccaatttttatatttttaggagagacagggtttcaccatgttggccaggctggtttaactcctgacctcaggtgatccgcccaccttggcctcccaaagtgctaggattacaggtaagagccaccgtgcctggcaaaagcacacttttaaggtcctcagaagctcaaaagtgaacttaatcttttggcatttttcttttcttttctttttttttttttttttgaaactgagtctcgctctgtcgcccaggctggagtgcagtggtgcaatcttggctcactgcattctcctgcctcagcctcctgagtagctgggactacaggcgcccgccaccacgcctggctaatttttttgtatttttagtagagacggggtttcaccgtgttagccaggatggtctccatctcctgatcttgtgatccgcccgcctcggcctcccaaagtgctgggattactggcatgagcccctgcgcccggcccatacactttagtcaactttttattacaggtcatttttttgcctgtacatgcagatgcatcccactttatatatataagaatattttgtagtagctgtccagtaatttatgtaagcagtgtcctattggtgattgaagtttttcatttcttagttatttttttcaattagaaatattacagcattgagcttctgtatgtattacctttttgcgggtgataaatctttccataggtttaaatccccaaagtgggctgttcatttctgagagtttacatatttaaatatgatagatgctgccaaattatcttctggaaggagtgtactggtttccattctcactggaattatcaaaaaaatgcatgtttcccaatacctttgctaatgttgtgagttatcagttcttctttctaatttgtagaagaaaaataatagtttttatttgcatttctctgacttttagtgagcttgaattttcttcagcagagcatagagataagagccaaactgacctgcattttttatgtcacgtctgtcctttcttggtgaactgcctgcctttccaatgcagtagctcatggtttccactgaaaatgtgaacattaacttcataaggtcactaggtgtcactagaatcccattctgttgggttccttctgggagtgttcattttaagatcagatggcaattgataaaattctgacatttcctttggatgtagaaatttttaccttgaagaaagaatacataaagttgaaataaaggtcagcttggcccccactctaagttctgttgaagacaatttatcatttttaaacaactgcaaactaacagctaggtggggaatacggttcacaggctttgtccttgctaggctgagagttggttgctgaccgaaggccatcaccccctgcatttagtgtttgctggaaacagggacatattcctgcataaccacaacacaggccgacattaggggcttaccacggctcctttcctcccggaatcctcagactccattcctatcctaccagcagccagctccacttcccgcctcctcagccttctcaccctgcagccattccttagtctttcactggcttttgtgactttgacactgtttaaggtcactgaccagtgataggaacgtccctcagtttggaacggtctgatgtgtcctcctaatatcacatcaatgtgtaacagtggatgtgtagccatttaggactgggcaaattactcaactgctgggctctaggttcctccagtagctcctgagttaacttcctacggttatttagtgctagaccacagaagttcgctctctgctggcagagcactgttgtgcagacttctctgagtctcctgtgttcttccttgtgtgtcagggacacacgtgaaggatagcgtgcttcgcggctggaatcttcaaggagatgccattcacttttttacctcactaacacagtgccgtttacaaaaaagattaatgtacttttcctgaattgacttactgactgggcctagagaataagatactggtgctgggcagtttggcacaagagtagcataaagaatgcaggattggcccaggtgaaggcatcgtcctaagggtagaatgagagtcggtggttcctggccgacctagcaggtgtactgtgggaagtgctggagtgaatcggctctctggggagaataagctcatcacagcacggcttcccgaggagaacgttgctgctttgatttctgttggctctgaggcagcagcaggtcaaatagttggttctctgtttagagacatctcttgaaacacttttcgttttgaccactagatggtgggataatgttatcattttacatttctgaagaaaaatagaaatctaactggaagcttttttgtctgttcagtagattttggttggacccctggtaaacatgggtttcagtgtagcagctttaatgtgttaccacgtgtgctaaagcatagctgttggcatgcagaacggcattaccagcagtaagtgccacttacttcttcatagtgagtgatgatagttacacccaggtagatgaaattcagggagagcatctctgtgcaccttacatcttatcactctgaaggatatgtggttgggaagcttctcccaaaggaacagaacacatcttccacaactgtataacctatgtcaggcacacgttttcctgggttgaatcaagcccttccttaaactgctaacttaaagaatacttactggttttgtaaagtttggcaaatgatcttctctgctcctcggttttctgtgttgtgcaataggaggcaatggtagtggcttttccagcacggttggtgtgaggcttctcatgagctgggtgacctttgtcctgatgatggtggtgattttaatactgtgtatttgataacacgattatctagggtctcctctacgtctttcgtccagatgcatctcagccaccccccttttgctgttcccttaggcataatagtggtaaatcggtgacattttgcttgagtaagaagaagctgctaaaaacttctcatgcttaaaattggtaattaaggggactttttaaaaagaagcacagttaaaaaacatttccttcctcgttctcttccacccgcctccctttcccatcacttttattagatacagcattctgctcaccccattattgcaggctcagatagttggtttgtttttttaaaatcagctttataaaaacatttacataaaataaaatggacccattttaagtgtacattcacgggttttttgtgtatacctgtgtcaccaccacaaccaaaatacagagcattttcatcaccccaaaatctccttcgtgtccatttgctgtcggcctccctgccccctcctcccaccccagggcagccacagatctggtttctgtcattaaagattagtgtcaccaattctggggcttcagatcagtggaatcatccagcgtgtactattttgtgcctgacatcactgaaggtgatgtttttgcgatctgtccgtgttgtttgtagcagtggtttcacttccttttatagctgagtagtattctattgtaggcatgtagcttggtgccaccagttgatggagattgggctagtttgccattttaggttattatgaataaagttacaatggacatttacatttgtgtctttgtatgctttcatttctcttgggtcattacccaaacttttccaaggtggttatggcactgtatattcccaccagcagtgttcctttcactccacgtcttcaccaatagttgaaatttatccatcttttgaattttagccattcaagcagatgtgtagtggtatttcatggttttttttttcccaacattgttttaagatctaattcatatgctacacaatttgtccaattaaagtatacaattcagtggttttaaatatacagtcaggtattgcttgacgacagggatgccttctgagaaacgaataggtgattttgttgttgtggagacatcacagtgtgtattaacacacacctgcatgacatagctactgcacacctaggctctgtggcacaacctgttgctcctaggcataaacctctacagcatgtgcagttgtgaaacagtggtaagtatttgtgtctctgaaatacttaaacatagaaaaggtagagtaaaaatatggtataaaagataaaatatggtacacctacatagggcgtttactatgaattgagctcgctagactggaagttgctgtggttgagtcgttgagtgagtggtgagcgaatgtgaaggcctaggacattactactatacagtactatggactttatacacgtcatacagttaggttacactggatgtatattttttggagcaactgtattaactgatactataacgtttttttaaagacaaggtcttgctttgtctcccaggctggagtgaagtggcacatttatggctcactgtagcctcaacctcctaggctcaagcaatcctcctgcctcagcttcctgaggagctgggactacaggcgtgtgccactatgcctgggtaatttatttttatttttatttttgtagagacggcattcttgctacgttgcccccactagtctccaactcctgacctcaaacagtcctcctacctccgcctcccaaaatgttgggattacacatgggagttattgcacccggctcctcccataagtaaataatctatctctctgttacttgtggtgggaggaaaagaaaaaaaacacctaggttatgtataatacctaatacgagtacttcgtaagtagttattatactgtttttttttttttttgaaacggagtgtcgctctgtcgcccagactggagtgcagtggcgtgatctcggctcactgcaacctctgcctcccaggttcaagcgattctcctgactcagcctcctgagtagctggaattacaggcacgcaccaccacgcccggctaatttttgcatttttagtagagacggggtttccccatgttagcctggatggccttgaaccactgacctcccgcctcaacctcccaaagtgctgagattacaggtgtgagccaccacgcctcgcctatactgtattttttttttatttggccttactatagcttttttacatgataaactttgtaattttttaaatttttttactcttttgtaatgccttaaaatacattgtacaacagtataaaaataccttatatctttatcagctttttctatgttttaattttaatttttacttttaaacttaaaaaaaactaggacacaaagacacacattagcctgggcctacacagggttaggaacatcagtatgtcgctaggcgataggaatttttcagctccattataatcttatgtgatcactgttgtgtatgtggtctgtcattgaccaaaaggttgttatgcggcatataactggattcacagagttgtgcaaccgtcaccacaatttaaaaacattttcgtcacctcaaaatgaaacttgcaccccttagccctatcccctattctcccgccagccaaggcagcctctagtagtctactttctttctctgtggattttccttttctggacatttccaataagcggaatcatatgatatacggccttcatgtctggcttctttctcttagcataatgttttcaaggttcagtatgttgtcatctgtattagaatttcatttctttttatggtggaatcatgttccattgtatggacacgtgcgcacgcacacacacacacacacacacacagaagaactaaatattacaaggcttatcatgaaaaacaatggtctctttcttgacccttttcaccctcaattcctgttccccagaggcagctcctttcacacttgtggctgcttctgcagataagctgttcggtgacctccatatttctaaatactgtggccgtattgctgtttcggtttttcagtttcaggtattatctagtgactttctgatagggaagtgagaatttcgtttttaatccgcccctctgagtgcacctcactcccacatacactcatctgctgtttgcatggacacattcatgtgcaggctctttccactcttgattgcagtgtacatgatacattttggttaaatcggtagtttatgtttacatcattatgaatgtggaagttgtgtgttaggctgaatctcagagtgaaccatgaatatatttcctttcatggaaaactttttgttttccctgagcttggcctggtgtcctttgagtccagagcttctcaggctccacttatgtgaacatggacccagtgcccccattggacacagggtggcagtgagtgggcacaggcaaggagagaaggagagtcgctccctcttttcagccttccaccctctgccctctgcactttgccccctgccccaccccagactgctgtggcttcacctgcgcctcctgcccttgaggggttctgagctccaggttctgagctccagatggactcctcccccgccccagctgccaggcttgggtttccctttttttttttatttgtttgatttcatttccccagacagctcttatctactctttatttttgttggtttatgtctttttgttttcctttactatcattttattggggttttgggggtcaagagaaaagcatgtgctaagtccaccagatttaaccagaggtcaaaaaccttccatttttattgtctaaatattattcagttaaggattccccctccccatcttagtccccaactgcctttgctgaatctttagcgtctcctgccacagttattgcagtattccctgactggcctcctcctcctggaccagtgatctgcccacgacccctccctcacacctgtccccatgccccagacccacaggacagggtccaagctcattagcttagaaagtacaacccttggaatcacatgaattctttttttgttgctagtctcctaagttgcattcattcactcagtcatacaaatggtgtatgttttccccacaatgtcaccctgtttgctgcactgtgcttgagtctatgctctgcttccagatggaagatctgtgtcctcccacatctgcctccttgtcagagttgagtctggtgatcatctctgacctgaagctttctctgaaccatactcgttatgcaacctgttgctgcttttctgcctggttgtacttctcttgttacaattactgcactgtgttcttttttaaatttgtacatttttgcagatttctctgatgcctggcttaatagaagacagttgccttctcatatctgcctctgcattcagtgtattggggtggcacatgtcgttttgcttcggaaaattccactgcattgtatactgaggggataatgcgagatgagaaaggaaaatcacacgttagtgttgttataaagatagtattgactttacacaccctcagaagggggtcagggatgccaggatgacattcactaccctagtgtcacttaccacattgcatagaccatactgtgccgtacagaggcacatatttctgaaacttcctttattcctaatatattttgtagaaatttctatatcaatatggatatgtgttttttattgcagtgtactttattttttcaaataactgttcgtgtgttagatgttgaacggtgataggcctgtgagggatagttggagaggtgagtagaggccttataaaaacacttaaacagcagatgagtgagaatatgctctaaacatgggagtgacagaaggtttttatctaggttgggaagaaatttaagattaatatttcaggaatgtatgagtgaattagaagaggagaaacaaatagtagggcaggagatcatttagaaaatcataattatttagacttgagtgacagaatgctaagaaggagataagggtcacaggaatccagagatacgaaggtggacaggagaaatggcaggtgtgtccacagggcaggaggaggaggcttggcaatgcggagcattggttgcacacctgggccttggggctgatggtggtgtctggacagaaacacaaaaaggacaacccaattttggaggaaagagatgtcctctgacttcaatttctttacgtcccttctacctctgaattatctgttttatggcctgtttactattaaatgatccatttaatagcatttacccttagctttatgagtaccatgcactaataattttgaagtatgctacaagtcaaaaattgttgtgtaaaaattgtacttcctttacctgcctcttgcttctgttatacttaaataccagatagagatgattttgggaagtttgatttatactgacttttgtatttgcagttgtatttattttttaaaagtctgttaaaatgacctagctatggatttcttaaattgctaatacatgtgcagatttagtgctgtgtcaatgtataatagaagcaaatactcattagactaccttaatttaattatacagatgcaggacagctggagcacacattgatgaatcattgttccctgcagctaatatgaatgaacacttatcaagcctaattaaaaaaaaagtaagtacatgatttcaatgtagataatggcaattaggaatttattcgtttttattttttatttctagaaaataaaacttctagaaatatattcaagagttgtcttaaatatgctattgatgatattgttcttttcacatagcatttttaagtgaattacagagattattttatcctatgacttcttcgatagcatttgtatgaaatggaaaagcctgtggttggccatgggaagactaaaaggtgccaagagacaagcaaacatttaggtgctttggtaattacttcagaatgaagtttgttatatctgtagccaaaatacctgcattctgtttagccagataaatctcaaaagtccgatggacctacatccaagtgtgcaaagtcatttattaggaaaatctgctgtacaaatacagttgtccttcattatccacagaggatcagttccgggacccccacagataacaaaatccactgatgctcaagtcccttatataaaatgccatagtatttgcatgtaacctacacaaatcctcccgtatacctaagaaagaattgtttgtagagacagggtctttctatgttgcccaagctagtctcaaactcctggccccaagtgattctcctgcctcaacctcccaattgggattacaggcgtgagccactgcacctggctcctcccatgtactttaagtaatctctggattatttaaaatacctaatacaatgtgaatgctttgtaaatagttgttacactgtatttttttttaatttgtgttaaattttttttcttttgaatatttccaatcgcgactggttgaatccatagatctggaacttgcagatacagagggcaaactgtagagttaaagacattgctttcatttgagatagaattcacattttaaccacaaccttttcggctttctatttatgtaaaagttctaattgtgatttctttatctgagggtactttactctgaaacatcacagccagcttgttttcacatgagattctctgttagagggaggatttgatgactttctccaaactgaactacatttcctgtagactagaggagaaataactgtgaatttcacatttcctgaaaatagtaaatgatatttcttcgttacatttcatctcagacaagccatagtttgcccatgcagtgatagatgaacttcttcagtcttacctgattataggtgaacaagtgttcagcagtctctggactccctgtgacatgctaaaatcaagtgtttattgtaaaaacacatcagtagtacatacatattttctttgtaaaacatttagtaaacacagacatctctttgattgccctccctcaatgtaagcagctttcaatttgatgagtatcctaggtggcatttcttcagtacattacacacatgtacacactcacacatgcatgcttgacgtgaaggggctctgctatcttatgtgtatcatttggtgagttgccttctcttccccaattaacaatatggttttgaccatttcatgtcggtagctttgactctactcagttttctgtattgcattatacattgtgactgtttttccggtattcatgtacttttagtcactgtcagtttttgctaagtatattacttaagccacatatttgagtttatttctccaagtcagatatctagagataaaattactgggtaagaatacatacacattttgattttaccagctccaccaatcatatacaagatgacctatttcttggccagatacagtggctcacacctgtaatcccagcacttcagaaggccaaggcgggcaaatcagttgaggccaggagtttgagagcagcctggccaacatggcgaaaccccatctctactaaaaatacaaaaattagcccaacctggtggtgcacacctgtaatcccagctactcaggaggctgaggcaggagaattgcttgaacccaggaggtggaggttgcagtgagcccagatcatgccactgcactccagcctgggcgacagcaaggctctgtctcaaaaaaaaaaaaaaaaaaaaaaaaacctatttcgtgatactctgaccaatattggatgttactaatctttttaatttttcctaatctgaagcattaatgattgcttgtacactttaccactttaattttcatgtctaaaaaccttccctttccttctcttttccaaatgtaattgcaaattaaacccgactcaaggccttattcttttgggtccttgagatggttctgtgcctctgtctcccccctcaccctgtctgctgcctgcctgcccagcttgctgttcctcaagcatgccaatcgtatttctatttcagagccattgcgttatctgttccctctgtctggaacattcttcccccaaaatccttacacatgacccgttttccagcctccctatggctttgtgcagatgttactttctctgtgagacctatcctgccacccgtttataccagcagttccttcccacttgtgccaactatgcaagtctcttttcatctgcagtgctgactggctcctcctaacacactgtagtaatgtgggcagtttgatggaatacagttgctagagaagattcacaggaccccaaaataacaatgtgtccaacctgcaccgtacctgagaaccaggaagcgcaagatggagtgtcttcttgtatactgctgaccctgagtctatatgaaccagccccactggcagagcctccaggcaaatccttcatctcactactcataaacaatgttgacaggccagcacaatctgtccccaaacttcccggacctgtggctataaagcaccactgtctaattagtacattttgtgtcatgcaggtactttagtgaaagcagtgcaggccggttccaagcctgttgaaatgaacctcccaagacacatacaatttacttatttattatgtttatttgctgtcattccttaccagcatacaagctccatgatgacaaggatctttctaggttgcaagaccagcgcctgacataaagtcatgttttttgtcaataaatgagtgaataactaacagagcaagatccccagtataggcattagccttgagtagctaaaagaagttctttctatgagactggagcaaaagaagttagcgtttacgtgggtagctagctacccatgtaagcaaatttgggctggtagcttcgcgctgaaaacgaaggaacctagacagatgacttaaatttccctggggtcctataagaaagaagtcaggcataaaagtgttataggtaaaatcgatgtgaagttcagtatgtgtatttgtgctgatggctgggctaaagacgggaagtcaatgggcagttccaagaacagaaagtggggtgggtaaggctgggaacgtgaggtgtgtttcaaaggaaacatttcccctgtctgaggatggttaagagtagagttaacccaagaccttcctgtggatatcagcctggggtttcatgtgtttgtgagtgtagttacagtttttgggttttactggctgattggagttactgtgatttaatgacggtagggcaagcataatcatggttcttttctttggtaattataaaatagaaattgttttattactgtgttgtggtcttgcagggaggatgacgtgagaatagtgctaccaagcaggcagtgggcgtgctgccaacccacatagagtccaagatcatgccacttgttttgagaaaagaaaggctttattgcaagttgcctggcaaggagacaggaggaaactctcaaatccgcctccctgaggtgggggctcaggcagtttcataggcagagaaaacaaagtgtgatctgattggatcttgcaatggggtgatgctgggaggtgtcatctgactgggttgtgtcacaaggtgatgccagggctcaatctgattggatcatggattatgccatcaggtgtttactccttaatttggcccccgttccttggtctaagtgcttaggttctgcccgtggttacatgcttggttcacctgggcatgctcaagtgacgtaacttgcaacttcaggggccgtggcaattaaacagttcaccattttgatacacaaagttgaactagattgggctggtttggtggtaagaacagcaaaaaatcgaaagagactggctaaaaactttcatggaaactaagaatgctaggatcatgaaaatgtctcacaaagcataatacagagccttttatacagtcttttaaattctgtccattttctttataactgcacaaaaaaataaatattgccagttcacatacagtgcaagaaacacctcttttagaattttttattactgatgttataaaaggtatcagaaatgtatgcgaaagggctttttctcctgccttaagcagttgcagtacagcattaatttttgtgttctttttgcacagcgtaaatgtatgcagcccaaagattttaattttaaaacaccagaaaatgataagagatttcagaagaaatttgagaaaatggctaaagagctacaaaggcaaaaaacaaatctaggtaagctaagaaatataatacagttctttgcatttgtgtccatacaccttgtttaatttgcatgatgactagtggggttcagcatgagagagctgatgaagactatgatagctttactctatgaaggagaaaacaaaatgtcaggagcctgcgggagacttggctgggagccataatagagccacgcagcttgagctaatcgaccacagtcttaaccattcatcaaggtggtcgaactttttattttcgggaatgatttcagaagaaaagcaaactttggctaataagcattattgaaataaatacctatttatttcttctttatatataactttgtatttttacctaattggcatttttgttttgttaccctgaataggcaaatcttagatgatacattattttagtgatttgggaaaatactttagaatattatgttctataacaagatgtcttagaaaaaaatatatgtattcttatgtatatatattgttaaataatatttttatatataagaatattatgggctgggcacagtggctcacgcctgtaatcccagcactttgggaggcagaggcgggcggatcacgaggtcaggagatagagaccatcctggctaacatgttgaaaccctgtctctactaaaaatacaaaaaaattagctgggagtggtggcaggcgcctgtagtcccagctacttgggaggctgaggcaggagaatggggtgaacctgggaggcagagcttgcagtgagccgagactgcaccactgcactccagcctgggcaacagagtgagactccaactcaaaaaaaaaagaatattatgaaacattaagatgctttgtacgtttttggtatttctgttttgcctttttcactgtcgtctaaagtcagtatttcctactaattctgacacagcattgctacagataagcaattatggtcactagaaattcctaggaagcattaattcctctagtttttgttttctttgttttaatctatgttactatgtcacagattctctattctgtgttttgaaattattcaaatagaattgtcgagatttattttatttatttttttgagatggagtctttctccatcaccaggctggagtgcagtggtgcgatcttggctcactacaacctccacctcccgggttcaagcaattctcctggctcagcctcccgagaagctgggattataggggcgtaccaccacgcccagctgatttttgtatttttagtagaaacagggtttcaccatgttggccaggatgatctcaaactcttgacctcgtgatctgcccgcttcagcctcccaaagtgctgggattacaggcgtgagccaccgcgcccggccaagatttattttaaatctgtgacgataatgcgacagaactgggtagaacacttagcccacatagtgctgccacataattttccagaaacatggcctgcatcatttgtttcatgctcagccctcccgctgcctcacctggtgcgtgtccatccttccttcacaccagctgtctcgtcttcgtcaaagctcaagccagaaacgtgcaatcgtccttgacatctccttcttcctgacactaacccccatcaagaccatggccctgcttctgaaatagttgtttgacttcttctgttttctccttccctcctctctcccctgatgcctggatcatccctcctgcaccactgcagccactccttacgctgccctccactgtctccttacagttcatctctgtgctgcagtcacaatggtgaaaactttaaaccagaaggacatcccctccctggtttaaaatttcctggtgtcatcccaaggaaaaatattcaggataaaatcctgtatttaacatatcctccaatttactaggtgctttatgatctggcctctctttctagcctcatagcaatattgcacactctcctataattctttatacttttgtcactttggccttctttgctatgtcagtgacagtgtatttgaaaatactttggcaacatggtaatgatagatacaaaattttcttcttagaccaaatatgtatcgtaattaaaaactatatgtataaagtattaatgattcaactaatgtacatttgtatattgtcagaactacagtaagggtgattcaggcttaagagtcccaaaggagaatatattaaatgattcttggtatttttttgttgggggtgagtatcaaagttctgaagggctctttgagcatatgcaaggtagcattccagaaaaaaacacaactctgcacccacacaaaacgagctcataacttcatggttccgggaccatgctgatcccacttcatgcagtcaagttcatgtctgggtctgtgagtgtgtttgagggtaggagtgatggttcatgggggcagtttctgaaacctgagacaagaaacagaaactaaattgcattccagctttacaacttttaacttctgtgtctcagtctttgtcttcaagtggggatactgatttgggtttggatttgaggttggatgcactaatgcatatattgttcttagcacagtgcttggtgagggcagttgctcagcagatgtgagccagcagctgtagcagcaacatcactgcctgtggaggtggtggaggtagaatattagcaggagtaggtaatgatgttgaaagggaagaaggaaaacggggtgtggggggttgttctttaaaaggaatcacattcctgaagtatgaaggcactttttggtcttaaagtggattttttgtttattttcagatgatgatgtacctattctcttatttgaatctaatggttcattaatatatactcccacaattgaaattaatagtaggcaccacagcgcaatggagaagagattacaagagatgaaggagaaaagggaaaatctttcccccacctgtaagtaattagtttgtaaaatgaaaattatgcaaatagccgattcaattatggtggaaagcttcttttttctttgcctagatattttaatgtttcctggtagtaacacattttgacttatttcatggctggctttgttttccagaaaatcttatgcatcattaagatttttgaagcatatgttgggtgtatagtattcttcaagtttaaaatcctatttgttgtagctcctttgtaatttctattatctttggaattttttctttctttttttttaaaaaaaaatgaatcatgtctttttttttttttctgagatggagttttgcatttgtcacccaggctggagtgcagtggcgcgatctgggctcactgcaacctccctagttcaagtgattctactgcctcagcctcccgagtagctgggattacaggcgcctgtcaccactcctggctaatttttttttgtttttttgtatttttagtagagacggggtttcaccatgttggccatgctggtcttaaactcttaacctcaggtgatacacccgcctcggcctcccaaacggctgggactgtaatccaggcgtgagccaccgctcctggccgtgaatcatgtcttttgaaggaatttgctttagattaatgtatctaaggaatcagtttgtttttcattatttcttttatctttaaaatttttaattactgaagtgtaattcacattttaataaaacatttatcaaagtagctaatagtaaaagttcatcttgatacccatctaattgtactcttctacctgggggtaacctgtattttaagtttaagtgtttttccagatctgtttcagtgtatcagatatctgtgtatacatgaaaaagatacgggtttggtttctgtgtggaggtgtaatttctgttttacctaaattagataatgacatatgtattattatccgctttatttacttaagagtatcctggagggtttgtttgcagcttagttgttgtagacctatttttgttttaagatgctcaaagtagtctacagttttgatattgaaaatctattggtgggtatttttttcccagttattagaaattgtgttgcagtttttattctttttttaaccatatggtttggttgttcttgtttttttgttaagccattttcctttctctagacataagtctttccagcttcccaccccgactttttactgttataacccctgcatgtgcctacgtgaatccttgtatttctgagtacttcgtgtatttcaataatactaattcatacatgcagaatttgattttttaaagacatagagtctccctgtgttgcgcaggcaggacatgcactcctgggctcaagtacttctgcctcaccctctcaagtagctaggaatacaggtgtgtgccacgatccctggcttattgatagatatagtcaaattatccttcaaaaaatttgagtcatcttattgtcaccagttgtttataagaatgcccctttctccatacttggaaaactgaatggcattagcctgtagcctttttcagtcggaagcttgaaaaactggatctgttcttgaagttacttttgattagaagcaggtttaagtgccttttcatattactgactgacttaccgaatgcagcttttaatgtgatcaactattacctcgcttaattttatgtcctttgtccatatgtatcagttaaggttagtttcggctgcatataacaaagacaaaaaccaatgtgttacaatcgatagaattgcctttctctgtcttgcctagttcagaagtaggcagccagggctgggatgccattccatggtgtctttaagaaactaggttcccatctttctgttgtacctgcctggcttttcttgcaaaatgtgtgtgcctcccagctaagccatctccttttgacagccttaccagacgtctatccaatattcctgtctaattccattggctggaatgtggtcatatggccaccccttttgcaagcaagactgaaatgtagtcttgactgggatgcattgctgtcctgataaaatcaaagttctgttgttaagaagaagtgagaatggacattgaggtagataactagctgtgtcccaggtggacatccaaattgtttcagtgtgcaattatgtgtataaactaatttgccttaaactttactttttctattacttggcagtgttaattctgctactttactgcgtccagtacagtttaaaacttaactgaaaattttatgtgtgcttcccttccttatcttggtttattctctttttttgctgaagttttctcagaaaagtatccttttgagtctctaaaaaatatctttggatataagatccaaacatttcttttgtttcttgactattgtatgaaccgcctttgaagataatacttacgatcttatttgttaagtcattgacatcctaagtgttttctatgaaacctctaggatttctcaacccagcacagctgacatttgggtctgggtaattctttgttgggggcactgccctgtgtgtggtaggaagctcagcagcatccctgcctctccccactaacactagcagtgtacctactgctctccctcactggcgatatccaaaaatgtgtccagacattaccaaatatctgctgggaccccaacgtcacctctggttgggaagcagtgctctagttttagaggtaactatgatgagcatccttgaagaaaaatccatgattatcaaataagaagactagaacagactggaaatgttcacttaattctgttgagcttctgattagattcaggcaagttgactttaagatcccttctaactttgtgattataggatttaatagaatcacctatgattaataggaggacttcctgctggcttcatctgctaagaaatactgaaactttatctaatgcagtgtcttggtcctgtttttagcttcccaaatgattcagcagtctcatgataatccaagtaactctctgtgtgaagcacctttgaacatttcacgtgatactttgtgttcaggtaaaatttttattttcctttctgtgatatgtttaagttttgagaataatatgattttctgatttagaatttcatgtagcaacttctgatgagtaaaataattagttaaaactagaacttctaaatttccccctgaaattaggtattataataaaattaaggcatgagttaaacttcctttttggttcctataggttttttttcctaggcatttgctttcttgctacagaatccattgctctatttaaaaaattattgtgaacgtatatgaactaatctgtatgcagtttaaactacatagaactgaggtcagagctaaggaaatgttgtttcacacaatgtataattaacacaaggaacctgttattgaacggggtcagtgaagtatgtaaagatcgtcaattgaggagataaatagaggatttctaattagaagcagaaagaacactggtaggaattagtgcagttagttccatgttacgcacatacatgtttgtaatgtgggagccctagttccacttaggatggtaatttttcatggtcatatcttcttcgtaccaaatttcttacagtttcttcacctagtccccagtggggctcaagtaagtagcagtgatccctgaaagtactatgttcaaaagtgcttgagatgttatggaaaatttatcatgaaagccacagcaatgacaaagcgcaagatggcatcaagatattagaagtttcaaacaaagcctcctttcagcgcagggttaatccttgtactctcacctctgtgtgctggaattatttacccatttctcttaaacagtctccatctttttattttacacttgttacatttatttcctagaagttggaaacaagtgataataatagctaacattgatttcatttttgttgttgtaggcactcctctaagtgtcttattcactgttatctcatttattctcccattagccttaagaggtaggttccatcaccatcccattttgccagtgaaaaaccaggacacagaggtcaaacagcttgtccaaggtcatgtggtttgtgaatggcaaacccaagcttctaacttaggcagtctgacatcacagattacactcttagtgacatgtcacattgcttatcgggtttttgaaaagtgtgataaaacataaaacaattttaggtgctgaataagatatattgagcatctaaaattaaaagtgaccttatttccaactactgccttgaagacacctggggcacagttggaagggaagctttggtggttacctgtgttcttcctttttaaagtagaacttcagtgatttcagacagagagttctaacacttacgtgacctccagattgagtgatttctacaaaacacaggccctccaccagcaagtgctgagcccctattgagggagccagcacgggactagagacttcttcatattcattccagtagcttatagcacagtgacgggcagatgcccacgtaaccatggggcagtatgatgcatgatggtgtgtagcagagggggcaaggccagggagagctggcaagggcagtgggagggtcccagggatgttgacaacccaggtgggtttggaaggatgaattgtatttacccagaataaagtgtggaggaaaggggaaggcccagagggtacagaggagtatagaatatttaggaggtagcagcagcttagcattactctcaggaaatgagtaatccatataagagttgaaacattaaagcctaccaaatggctcacttttgaatatcagtgtaatacgaggactttactggaagacagggaaggtaagggtgagctgtgttcattgagggaatgtttcatgcaagtctagaactttccctagatcttacaacagtagttcttaggttttagaattattgatctcctggaaaatttagtgacaaactatggatgctcttttggaaaatgtgcacatgcatatggaaatttgcctaaaatttttagaagtttgttacacctcttctctatccccactgctatcccatacacccatcaaagcccaggttctctagttaaaaatactggcctaaaatgtacccttaagtggaaatgagaagaactcaagtgtggttaatagtcttcttaactaatagctgtactttaaaagttgttttattggtcaactgaaagttgaatatagaataatttaaaccacttttaaaagttagctctccgttaatgttttccagatgaatactttgctggtggcttacactcatcttttgatgatctttgtggaaactcaggatgtggaaatcaggaaaggaagttggaaggatccattaatgacattaaaagtgatgtgtgtatttcttcacttgtattgaaagcaaataatattcattcatcaccatctttcactcacctcgataaatcaagtcctcagaaatttctgagtaatctttcaaaggaagaaataaacttgcaaagaaatattgcaggtaaagtagtcacccctgaccaaaagcaggctgcaggtatgtctcaggagacgtttgaagagaagtatcgtttgtctcctaccttatcttcaacaaaaggccaccttttgatacattcaagacccaggagttcctcagtaaagagaaaaagagtatcacatggctcccattcacctccgaaggaaaaatgcaagagaaagaggagcaccaggagatctatcatgccgaggctgcagctgtgcaggtcggaagacaggctgcagcacgtggcgggacctgccctggaggctcttagctgtggggagtcttcatatgatgactatttttcacctgataatcttaaggaaaggtattcagagaatcttcctcctgaatctcagctgccatcaagccctgctcagttgagctgcagaagtctttctaagaaggagagaacaagcatatttgaaatgtctgatttttcctgcgttggcaaaaaaaccagaacagttgacattaccaatttcacagcaaaaaccatctccagtcctcggaaaactggaaatggtgaaggccgtgcaacttcgagttgcgtgacttctgcccctgaagaagccctaaggtgttgtagacaggctgggaaagaagacgcatgcccagagggaaatggcttttcttacaccattgaggaccctgctcttccaaaaggacatgatgatgatttaactcctttggaaggaagccttgaagaaatgaaagaagcggttggtctgaaaagcacacagaacaaaggtaccacttccaaaatatcaaactcctctgaaggcgaagcccagagtgaacatgagccatgttttatagttgactgtaacatggagacgtctacagaagagaaggaaaacttacccggaggatacagtggaagtatgtgaatctccttttccaagtcaccttcgctaaataaacatgtaacagtgcatccatattttaaatttatcacaactttttcataacttatttccccatttactcctctttttacttaaagaatgtgcatttgatcattccaatgataaactctttaggaatagatgacttgctgtcttgtggaacttctagacttattggttaagtctgttaggaatctatttctccaagacttttccttcttataggtcaaaaggataagtagtccatagtatgaataactgaggggagtgaagtctttttccttattccattggagtcttggcgctgcagcgtgtgtaaagatgtatacgatagagagttttttaaaacctaggttcttaatagtgaggctatttaaagaaagaaattaaggtagattaagccatcgattgtatcatagagaaagtgtgaaaaactacttttagaaatctgttgtcaatattgatttttgaagaaactttggtcagtgttaactatgaagaaacatttaaacatttttgatcatttgtaacaagccttgtttaacttgtacttattttgcttgaagcatcacttgaaaaggtttactcctattcataatttaattgtaattataataaaccatatcattttattaaaagtcaaaacaataaaaaattttgcacttcacagttataagcacaaataggttccagcaaccaaaattgaagaaatcttgaactttgaccgtctttacctaaagattaggttaaaatttgagtgagaacgcattctctctgcatgatttctctgctctacaaatgttttaactgcctctttgaaggtggagaagtcatggtagcgtttgaaatcatcacagacatgttacataccttttccttgagtatacgctccccaaaattgtttcacaaaaagaatgaaaataattttatgtttttggcctgctatttatatcttggctttctgaacatatattaaatttgacaagaaactgtattttatgttccattagccttagtatgtgttttcaaaatatttattttaaaatgttgactcaaaagttaatataaaacaatagatgtgtaaaattctttggtagttaagaatatcctgttctgaggtttacattctccatctttccagttttcaccttgtgtattttttaagcttttgaataataatgacatggaaatgtaaattaagtaggaaaaagctggtagcaaacagtgtggcatggcctaaaatccccgtgttgctgggagtgtgctagtcctcggaagcaggtgtgttatgttctagaacactgcccccctgcgtcgacagcctccggggttgggggtaagtagaagggggtgaggggccagcactagttgactcaaggcaccctggtggggacggagaggttttttcgctcagtggtgcaggccatcaggcaggggtgtccaggcagggcccgggtgcaagaaaacattctgtgtgcgctagtgcgagaggatcttctacagtcacctgccttcatgccattacagacagacgggaagtcactgggttctaggacataaaaagacctacatgttggctagcctaaatcgaacccttttatagtaataaagattcatcaatgttttaaactgtccactgtcagccccctgggactcaggtgaaccaactctctttgggaatctatcttagaagatgaaaccataaagccttcagtttcaatgtcagggatgcacactctatatctggtgaaattatggaggggtgaaaacttctgtacagcaaactgtacctccaaatctttaatgtcgaaataaagggctttttgccatttctgttttcagttcacttttacttgttgctgttgtcagtatctaagatacagtgtaaaaaaggcttcaaaaacaagttacaaagagcttcaatacgctgatagaacgggaactgagcgagaaacaattttggttttgttttgttttgttttttagttttttttgagacatagtctcgcacttgacgcccaggttggagtgcagtggcacaatctcagctcactgcaacctccgcctcccgagttcaagcaagtctctgcctcagcctcccgagtaactgggattacaggcacccatcaccatgcccagctaattttgttgtatttttagtagagatggggtttcacgtcttggccaggctggtcttgaactcgcgacctcatgatctaccctcctcggcctcccaaagtgttgggattacaggcgtgagctaccgcgcccggccaacaattttgttttctaaaatctttaaaatcattaatttttttcttttttacttttttattctcttaattttataaacagtacacagatacattcccattgtaacaaagattgctaagaagactagaatttccatctcctcacttgcctcttttcactaattcacttcctaactaatgaaagacatgcacccgttgtgtctcaggtgctcttcaagtttgtggggacatagagaatgaagcagcgtgcaccctcatagaggaagacaaatagtaaataagtgtataacaatgtcagctagcaagcagttaatgataaaaagaaaaacaatactgcattggatagataaggtgaccaacgaaggcttccctgagaaggtgacatccgatcacaggcctggggagggagagggagcctgtgactctgtcaaaatccatgtttcagctggaggtaacagcaggaacaaatgtcctgatggaggaaaatgcttgcaggaacaacggggaggccagtacagcaaggacttcctgagctgcaggaaggaggttggagaggggtaagagccagagctttgggaccttcagtctctgacaaggcgggcagctgttttgttttgaagtgtgatgagaagccattggggcttttgaacaggggagcaaccaaatctgatttaggttttaaatgtaaccatggtcactgaagaacagactgtgggttggagtgtttgtctgcacgaagcagccactgtccacagtttaatatttccttccacacatttcttgtgtgtgtgtctacaagcatacaactgcaaatagatattttaagagaattttttgcatgcatagaattatattgccttaaaaattgctttttacaaaagcagtatgtcatatatttacatattggtaccagtaaatcttcattttctaatagagcctataggtagggtcagcacactttttctgtaacagatcagatagtaagtttattacgcttcatgggcaaagagaccaaatcgaggtatgtaggtactcatgagatgattacataatgagaaaaagacattttccacaaaatttttattgacactggaatacatttttttttgtaatacaggtctattaatgagaaaaataaaataatttgtggtgggggaataataacatttcatttaattggagttcagactgagtgttcccatcaccaacattgattgcaaatgtttattaaggctgatttgtaataagatagattttacgtatttcacttttgaaaatatcttttcacacagacagatactgctgattcgatgtcagtccacagttagataatttgcattgagcatcttcattgcttagaagacgctgatggaattctcttagattcttctctcgatgcctgcctcttagcgtgtccttatattgcagattcatcacttgcaattgaaaaataggtggaagctcctcaattgtgcagttaaatgggttttgaaataggaaattccggccaggtgtgatggctcacgcctgtaatctcagcactttgggaggccgaggtaggtggatcacttgaggtcaggagttcaagaccaacctgaccaacatagtgaaaccccatttctactaaaattacaaaattagccaggcgtggtggcacatgcctataatctcagctacttgggaggctgaggcaggagaatcacttgaacccaggagacagaggttgcggtgagccgagatcatgccactgcactccatcctggacaacgagagtgaaactccgtctcaaaaagaaaaaaaaaaaaagaaataggaaattccctttgctcttgcactcagtctgaaaagtgctgctgtagtttgggctcaggaagtatgtccacagccagtttgcatgggaatggagatcttcttgttttaacctctgacagcacaagagagaatcgttgcttatgtgtggaaatgtgtcccacctgacccttagcactgccaatcacagctcttcaaccaccgaaagtcagtttgaattgccaagtagttaaagccgactggtcatcctgaactagtgcacagcttggcttctagttgcttttcacgaaggagacacagttgtcctataggtgccgtgtgttcactagcaaaagcagaaaagtccttcctatctataccccacttgtccatgggtttgatacagattttcttctttgctgtgtgtgatggatttttacatgtcagcaccttgtacatacgtgttgtgagcttatctgagcaatttggtcatgtccaactaccagggtcttgttcatcgataatagtcaccagttgttggaggtcaatgatggttaactactcttctaccttctatctaccagatcttgttgaaggcaagtatcagaaagacatttattaaacatttattggcaagcaattaggaagtggtccacaaattgaccaatatgctgaaggcccagttctctgtcctttagtgcagtgtccatactttatctgaaaggtttgctggaggcagacaacattctatgggcaagtttctgcaaacttgcactcagcaccagaccatcgtgtatcctttgaccctgtggtttattatagggtcatttagggattaagccttggataccacctccagggataccagccacaactcatactagatggttatgctctgttatgtgtgggtattgggttcccctgcaatatttaagccaattcagtgttcttgaatccatgaatttaaccaataagaaactgtttctcacatccattatgctgattaacaagctgatgatgtcaccgataaccactcatttttgtcatccattttggcttttaacaaagcatctaatattgggctggatgatttacaggagttggggttttttgttgttgttgttttgagatagggtctcactctgtcacccaaattggagtgcagtgacatgatcgcagctcaatgcagcctcaacttactgggctcaagtgatcctcccacctcagcatcctgagtagctgggactacagacgcaggccaccacactcggctacgttccccaggctggtctccaacttctgagctcatgcaatctgcccgcctctgcctcccaaagtgctgggattacagttgtgagccactgtgcccagcctatggtatagtacattttgcaaattctgagcattcaagaggaactgtgaattactattgttgcaaataaatagatagacatatattcattaagtatgttaaattgttgcacttttgactcttcaaataattcacaagtgtattaagaaccccctttcccatagcctgccagcctaactcactggggctgcaaaactaagcaatcctagcaacttgatgtgggttagtcagtcttaacagaaggctattgaccacttaactgtttggttgattcattcattcatttacatattcattttttatctgtcagatgtttactccgtatctactatgtccaatgtataaacagtgagagaggtaaggttaatagaaagctctgtcccttgctttaaagaacttagctaagtagggaaggtacagtcaagatactttacacacaagtatcaggaaattcaaaagtcagagcaattactttcagtgggaattaaaattgatattggaatgacctctacaacgattacaaaggataaaattccgcattatctattgaagagtgttgtttttgtttttttcagaatgaacaaagtgaacttgatattttaatagatgaatatgaatacagtctcgttagcagagttttacttgtgtagaacccgtataacttgcatatataccaaaggtatctctggaaaggaatttttcctaggtgtcttttaagattctttccagtcttaatattttgcatactacattgtaaaataatttcatattcaaatttttgaagcttagaagacatttctcattggataatgttaagtgtatatttttacatgttaaaattatggattattcagccttcagaagccttttcaacccttgactcttgcatagtgcattgtaagagtaaatactaattgtttaaatgtgttattaatattagcattgttagtcttaattctgtatcttggaagtaggaaagtaggatgtggaggaaaataaatgttaaaaataagagttatttcttcggccttagctctagacaaaatttgacacaagccaagtttctcctacagtcttttcatcgtccacttcttcatctctccctttcctagtatttaagttacatgtgtccttatactgtcttgccctggatctggctccaaagtgatcatattagtcattttcttctcttttccctcagtatcaatacttttccttaatcttgcttatctctgttgagtagctgaaggttgtgatttaactaattcacactgagaggtgagtgagtgatcatttactagctttcattgatgtgtttgcattttgatggtattattaatccaaactaatttccaaatggtgaaatttcagataactgaaagataaaaatgtggggtctgtcagattcatttccgtatttgatcatttcgtgaaaacgaagtcaatgaattgtgtgtgtaatgaggttgggaggaaaatgagaggaagatatatggctttcacagggaaatgctgtggaccaaattgtgtcctttgacccccacatttatttactgaaggtctaaccctcaatgggataacatttggatagggtgatctttggaagataattaggtttagatgaggtcttgaagatgggggcttcatgatgagattaggaccattataaaaagaccagagaactggcttcctctctctctgccatgtgaagacagcaagaaggtagcctccttcaagccaggaagaaagccttcaccggaacccgaccatgggggcaccgtgatctcggccttcaggccaccaaatctgtggtattttgttatggtagccccagccgaagaagacagacattcatccaactggggtgtgttggaggaagagcagctaaagagtgcatgttcgttggaatttcttggagacattcaaaatagatgtccattaggtagttggatatagccagccatacctcagctgggaggtctagacaaggtacagagaattaggtctcttcagtaatggacgactttatgggaagtgatgaaatcaccttggggagtgagaagggagctgatgacaacccatgaaaaaaccacacttaggagcaaacacgaataaagagtcatccaagaagtgggagagtcaggaagaggagggtaggtgtttgtttacagacctcctgccaaaagtggagtccaactaatctttccacaaatgttttcagaagtactttgcactctcaactgctttgggtttaccgatgtcaatgttaaaacccactggcaaattagtgtggcagagtttatgaaatgttttaaataaaatcatttacttagatcattttttgacttcaggatttgtgaaattgtgaaaacatgttaacaatatcagtcttttttttttttaatatcagtctttcttaagttttaaaagattgtgttgcatttcttagaactttatgtttataaaatgctttacagcctgtttcgttgttcggcaagaactgaggcaagtggctattataaaacttttattgaatacactaggaagctgcaaatttattcatgactcaataacagagcactacgtcccaaattatatctctagtccactgcttttccgattttgacacactcatgcttcaagtaaatatttgttatttaaaaaggaaaataagtgcgtagtagatataattaataattctaattatttttaatcttaaagacgataggagattgcattcatgttctaccccgggggataaagtgggcctgggagaaaagtcagtgcaagtcaaccataaaagatacctgaggaggtacgggatcagtcaggatgtgactggtttgagtctcgagtggattcagtattagggattatggcaaagagtgtaggttggtaggtttgtggtttagaactggaccttaaaatctgtccagggcccaggctgcaaataacaactagcttgaattcaggaaagtattaacatttttattctacatcctttttcactgagataggaccctgtttttgaaaagagtgacagtttttaccttagactctccaaacttagttatagctggctttatagcattttatctgcaaagaagtctttctcatgttatatgatttttaatctctgagggcactgatgttaatttcacgttgcattatatttattcatctgcatctacattgtctattgggttgtgagctccctaagtgtgggactatatcttgtgcattttgcatctccagtgggtagatgattagctatttgttaatcattaggtaatcaacagtgcagtttggctatcacctgcctggcaggttctagtaccccctaggctgctacataacttttgcgtcaaagtttgcattataccattgagaccatgttatggtccatgttagctcctccttcaaaatcccatgtaagtcataaagtaggcaaactgtttgaaggaggaggaagggtgagagtaagaggcaccctctgaggcagtagatgagtcaaatcaaagtacacatttcacatttcatcgtgggttacttaggtctacagaggttagcatctaaggaaaccacatttcacttgaatgagtatccttttggtttgtgtgtcttcatggcaagacgctggtctaaggtggaaacttggggggagtaaaatcatcatccatcatttgtaggttgaagcctgaagctctgtactgaagactattttctagaaaatctcaaactgaccccaaaagttagattaattattgcctctaatatggaactgcctactctgaagagctgttctttgtcattattttaaaatctaagaatttaagtttgacgagtgcgtaaggtatgggtatacattttcttacattatcaaatggacggagttgatgctgtagaacactgtaacctgattgttaccgaccattgaattaagtgaattgcttgggatattggaatgtaataaactgaaagttctagatagatctcaaagagccagatatatacaatttatttaaaaggcctataacttcctgtttccattatgcataaatgtgatttttgttttgcttaagttgtatttggtccatgtaaagttctaactaatttttaatccccttgggttttaggtgttaaaaatagaccaacaaggcatgatgttttagatgactcatgtgacggctttaaggacctcatcaaacctcatgaggaattgaagaaaagtgggagaggcaaaaaggtcagtgtgtaaaaatattattttaaactttcaaatgctgatacatcataatgttcttctctgggtcaatgaaacataaaccagtctatctgacttgtcttttattctaaaaaattgattatgggtaaatgctggaaaactcagaatatgaaactgaaagcgttgtttgcattccagacaaagagttattattgatagagcaagctttctcatatcactttgctaatgcatttcttataaaaatgcctgtagcttctctcaagcagagaatgttggttgtgccagtgtttcttgccattttataatcggaataaatatttactaggtaggaggtgaagaatccaaacattcattcacttttgaactaaccaagtcttgacctcaagccatcagagtgaaaggtttatatactaacactcaggtacacccttccctttgtggttttggctttaaaaccttgctcttcctctgaaagactccgctgatcctcttacatgagtaatagaatgaggattttaaatgtttttatcattcaatatctacttgcattgcttaaatttaaaattagccatatatattataccttgtgcctcatttttatgaggccaaaaaagtataatgtagtgaaacctgaattcagaatggtagggaaaaaccataccgattgaaaagcaacagatgaaaagaatgacagagtagatgggtctgcatggggcttccaggtcctgatacgcaggcttgaacagatgggcggctgcatttgacctgcggaagagaaacctgactcctttgcttcttatcttggcaatggttaaaagacatttaaaattacacagatttcatgaaagttggcagtaacttgtagaaacttagatttctttactgatgctttctggtttgtctcggaaaaaaaagtggagcaagaaaatggaaaggaaccctatttcaggtaaagcaacagatgtggagagagagagactgtcagggtcccataacatgtttgtggcgtgggcaacaccaaggcacctgctctacaatggcgttgcgcactgtgactccactgcagcctgcgggacctgctcagcgcgctgcctcccaggggtggggcccttcctagaacgctcgcaacactgtggctgagtttgtgttttgcgtcccagtttctcagtcttcttcctactgctacatggccgcttgacctagttcatttggaaagaaataaagaaccagtttcctttgcatctactaccgttcccgtgcctctcctgctgatgcgtcgcatggcaccacagctctgttctgtgccctcccgctttactgaccctttaccctctgccagtgtctgcccagggaagccgtggtacctctcatctctattggtactctacgttgtaccatgtctggctttttttttttttaagtgctcagtaaatattgagtgttgagttacttgttactcaccataaaaatactccgtcctgtctgatcaaaaggcatgaggtttgactttctcatttgcccacagtggaagttactgtttcagacgagtggtattgcctccctgtgcctgggatagccctgaatctgatgggctgggtctgtggaagcactgggttagggacaggcatcctgggcgggagtgtggccccttcttccttatgaggcatctcactgtaaatggcatatgaatgggagatgggtacctgtttgaccttctggcattcttctgtagatcaaatagtaagtgctccataaatataaggtggtattactgtcttgagtaatgataaaagaatgagtggtcagagagggagacaaaatacacaattacaaatacacacctccatatctgccttcaactgctgtgctcaggaacaaaaatattttcatatattaaactgcctaacttgctcaaatttaagtcttcttttaaaaatattttaagagtattagtaaactttgccctcataatttagaatgtcatttctgaaacgaatccaccacttctggttctgtgtgaagaatcactcaaagcaggttttaaatgcagattttctgggccagtcatggtggctcatgcctataatcccggtactttggggcgggcggatcacttgaggtcaggagttcgagaccagcctggccaacatggcaaaaccctggccaacatggcaaaatcccgtctctacaaaaaacacaaaaattggccaggcctggtggtgggcacctgtaatcccagctgctcaagagactgaggtgggagaatcacctgaacccaggaaggggaggttgcagtgagtcgagatcatgccactgcactccagcctgggcgacagagtgagactctgtctcaaaaataaataaataaatgctgattttctggccccacctgagaccctcctggccagcagctcccgaccccagtgcggcaccccgtccttaacgtggaggggacgaacacctagtgagggcgaagaatccaccttctgtattgcgtctcgccaatagcagaaggagcaagacctaggtttcccctctttcgcaggattttcttcctaatccagtccttattagtgttcaccgcacagcctttgcttgaatgaatcaaaaactcctaatgccctagggtagtgcttcctgactgggctgcgcattggactcacctggggatctgtaaggtttgtggctgcctggccccaagccagacatgctggtgtcattaatatggggtgcaccctggccactaggatttttttaaactcctgaggtgattctaatgcaaagcagagtttggaaactacagccttgggacttttagaatttaaacaagtaatttatcctagaagaagtttcatttctttataaacatttctcatgtaaagttgtttcatttttagactctaaaattaaagaccaaggcttaaagtcctgatttgcgggctgggtgcggtggctcacacctgtaatcccagcgctttgggaggctgaggtgggcagatcatgaggtcaggagatcaagaccatcctggctaagacggtgaaaccccgtctctactagaaatacaaaaaattagctgggcgtagtggcgggcgcctgtagtcccagctcctcggaaggctgaggcaggagaatggcatgaacccgggaggcggagattgcagtgagctgagatcgtgccactgcattccagcctgggcaacagagtgagactccttctcaaaaaaaaaaaaaaagaaaaaaaaaaattcctgatttgtttgcttaaaggttgagtgagtgttttaggagcgcaaatttgatagcaatatagatgaaggacgtgttttattattttacaggttagaaggaagaatgatataaatttcttaaaaggtaacattaaatttattttattttattttatttttctgagatggagtatcactctgatgcccaggctagagtgtactggtgttatctcggctcactgcaacctccgcctcctgaatttaagcgattctcctgccccagcctccttagtagctggaaccacaggcacccgccagcacgcctggctaattttttaagttttttgtagagatggggtttcaccatgttgaccaggctggtctcgaactcctgacctcaagtgatctgccttccttggccctcccaaagtgctggaattacaggcgtgagccacagcacctagccagcaacattaaattttaagtatataacttcccagtagtttgagatcttttgatatgagcatggggagagaagtttatgttgatatgtggtaatgagtccacagaaacactaaaatttagtttcctggttttaaaagtatacagtggaattgtggaaggattgaattggtgaattaaaattagaagcttctgagtagcagcctacaaatataatgttagtatctcaaccattctttttttcccattaaataggttttacctgcttattttgttccttgttagatttcaagataaactgtgttaaactgaaatttggaacttaacacggccttttttgtttgtttgtttgagatggagtctcgctgtgtcacccaggctggagtgcaatggcacagtcttggctcactgcaacctctgcctcccgggttcaagcgattctgctgcctcagcctcccaggtagttgggactacaggtgcacgccacatatttttatgtataaggacatattaaggtattagattctattaagcacaaaattgtttctatttcctaaagaaaacaaaatcttgtaattgaatattaatgttgaaaaagggagagtttacaggaaatatctttcaccagctaatgactgaagcaatgcctctactagaatggagaacagtaaggtctgggcctgacatttttatgttttcacttgagagccagcctacatgctatttctgtagtgaggaaaatgatttgaaactcagatgtgtcccgtggccctaatgactttattttctttttagttttaaatctgaagtagcacttgcaggtaatgtcctatctgggcagccctgcagacaggactgtcagtcgatgagagctgtcagtcgtgagttctgagtaatgtgaaggtgccaggtagaaggtacaaaggcaagaaaggtgggaaggcctggagcctgtgcgaagagcagcacggccttggtgtggcccggggatggatgcagaaccgcgagaagagagaggctgacttcagccacggccacgggctctggggttagactgctctcatctttggttttctgtaggttcattgtgattgttgtaccagggtattgtttttgttgtttatttacttgagagtcacaggccgtcctgtctttgatctgttctggaaacttctccactgtgatttcttttgcctgttttctcacgcctccattgctgggaacgcaatctcgtgtgctatcctttgcttctatagcccatgtctcatgattttcctctatttctttcctcttgtatctccttatttcattctggatgtcttctattggtttcttttccatttcacctttgactctttttaagtctattctgatgctaaatccatatactgagttttaacatgtattatttttcagtccctgctattccatttattttttttaattattttttgtagagatgggggtctctccacgttggccaggctggtctcgaacgcctggtctcaaacaatcctcctacctcgtcctcccagggtactgggattacaggcgggagccttcatgccctctatttgatttataaaaaccatttccagttctctgtcaaaattattaatcctatcttttatttatttgaacatattatgcatatttcttttgaaataactcccttttctggctcccctcaatttctgtttttcttatctgttgttttcaatcatacgttccatatctaatatgcctggttagtttgtctttatcttcctagcagggactgagatgatctggagctggggttctgtctctgtgaggctagctgtcccctgggagtgtgggcttctgactctggttcacctcctcttccatgggtttcttcttccatgactcactgacttagtagctgggcaacgtctgcaaatagctggggcttgtttgtttgtttgcatcttgtccagcttttctgagggctcacagtgaggagcctatttcaaactacttagtccaccattcctggagacgatgggtgaattttaacggccacttaacttttctaaatagagttttggtgtgaatgcttctctgagaagacagcagtaagaggccaactcaagagaaatgatttttgagatgaacacgtaggtcagtttgcaaaagacacactaaacacctgaattgacattaattcagtttctcttaaagagtgaaaaaaaccatgattccatgaagaattatagaatctcagagctataacttccattagctttttttttggtgtaatgcccatttttaatggcaaaaatcactctataaatcagtcagaaaaagagtctgtttttttttagacttattttaaatatacttgtttcaaatttgttgagacttttttttttttttttttgagatggagtctcgctctgttgtccaggctgaagtgcagtggcccagtcttggctcactgcaacctccaccccaccaggttcaagtgattcttgtgtctcaacctcctgagtagctgggattataggtacctgccaccatgcccagctaatttttctattttttttttttttaattagtagagacagggttttgccatgttggccaggctggttttgaactcctgacctcaagtgatgtgcccgcctcagcctcccaaagtgctgggattacaggcgtgagccaccacacccggcctggtgagactttatttggaggatccagttaagcagttttattacctctgtaatcttagcttgcagcatgtaggtcattgacattgatagttatacatcttttcagagggagaaatagaaaatattatgacgaattttgacctgttttctttgttacttgttgaatattgtcagacacagaacccaaagaagctatgtatagataccagcactctggtagaaatacacgaatgtaatttttttttctccaagtatttggtttattctactacttctggatttggtttttcaaaatattgattattatcctcaggaacatttttaatgtgagttatcaacaggatagctttttgtaagtggctcagttgtagaatctcattttggagccatctctgccaatccagcttgttgcatgtgaaggcaagctgtgggtcagagcacagaaatgtttacagaggctttcctaagcctggaggcctggagagatgtgaaggaacaaatagagcatacttattttgatagtggtttaaaaaaattaaagaattacacaccacatagaatgcttaaattcctgaaagtttctcaaatagggtgcaaaacaaataatagcttgcatatgctgatagttgcttgttcttacatctttgctagaatatgagcccataaggacatagtctatatcctgttagtctcttaatactcagcaggatatagcatcacaaacaaaataagtgctcagtaaatattttctgagtaaataagagatgcattaatttcccttttactttttcagtgaacatgtttaaaacatttttggtgctcttaaccatcactcagtaatgatggaatcatcatcatgtacttcacttatttttgaatattcttccaaaacttgagagactgtcttctttcagtaaaagatggattctcttctccaaggctgtgcatggcagcgcagtgttgctaaagcattgcccccagagccagatgcctgggttcagtcccatctctgttactcacctgctctgtgggttccatggtgttgaacaaattacttaatatctgtgcctatacttctttgtgtataaaacaggaataataataatagtaccagtctcctcaaagggtttgtgctaattaattgagttgaaacatgcaaagagtttaagatagtacctcatatatagaagtgctcaaaaaatgttagctattttcttcagcaccagcttgggtgagggtcatgtctgcatattgactgtgctttgttctgcagctataacttggagtaggtctctcttacctgcctcctctttgcccactcccagagaccaccatgtgtctttaatgaaaatgaccctcaaaactctgggacagtccacactgtgtttcttgttggacttactgaccacaggcatgccagagccaaaatagagtcttgggcagggggtgagtataggagtatagccttttctaaaagctccttcagtgattctgagctgatggtcatcctcccattgagaacctttgttttgggggtgagatgtaggccattagcatgaaattgtgctctgtcatctcccccaggaggcagaagactgagttctgcggtcagaaatgcccgcttgggggatctgcttcctcagttttcgagagatgctttcctcatctccagtatcattagaaccttcctgaaagaactgagatctttgtgagctgcgatagggtactcacagctgtcatttattgagcattgtgacctctttttagattgagttttctatttctcagtcatatggaaagctgaaaagaaagtatatttcagagagctctaatcatgtctttattgcggaggcagtagattgggaattacagctcatttgggtgtagcatccccagagaaggagccttgcagtggaaagaagataaaagggtcccagtggtgggaataaaaagagtactagatgcccagagggtgggaaaggcctagcccagatgcagtgtggccaggccagctaggggcaggaggaaagagagctgcagggacacagatgccttcctgagcagagaaaatagaatacttgagccaattttcatgtaaaatggattattttcctggcgtttcctgtccttcaagtaaaaggttctggaatgagtacttcactgctgtaatggagacactaatattttatgaatgcagttttacagtttgcagtaatgccaggcctttggctgttttccattagatggtgcacttggctggaagcatatactcttgtagctttgattttaaatttaactttcaagttgaaagagcagtgactcatccaaaggacaggtgatatttatttattttttcttgaaaatgcagcacgggtatgttgttatcacacgtttaggggaattgccacacttcctcgaggatgacaccctttgtaaatatccatgtaaatcatttccattgttcagacccgctgtacgcagaaagataggccctttagtgccgaccagccggccagtgagctctgtaagatcgaaggtgcccttggtttccaacacagctgtttcagtgatctgtaattgctttgataaatcacttttggcagagtgtacccagagctggcagtggcggggatgtgctcgttgtaacaggtgtggggtccatcagcagatgttgcttgatgaagccatttaaaaaacagctgcctcttgatagcctaacagttgctttcagcccccattagcacgttgtttttttcttgttatgtatgagagaaaatatttctacagaaaacattaaataggatcttcaaagaactccatctttttaaaaatgtgttttatttgttcactaactgattttgcatgcattgtaaatgtgtggttcagaaattgtcaaatgtgttttggactggacgtggtagaaatgaggaccagccagggtggatctcctgtgcctcagtggtcgtctttggccacgtaaaggtagaggccaccgacggaggacatttcccactgggagacccacaggcgctaagagaggagctagccgaagaagtctatttaagatctgctgctttggccaggtgtggtggctcacgcctataatcccagcactttgggaggccaaggcaggtggatcacctgaggtcaggagtttgagaccagcctggccaacatgggaaaaccctgtgtctactaaaaatacaaaaaattacctgggtgtggtggtacacacctgtagtcccagctactcgggagactaaggcaggacaatcacttgaacccaggaggtagaggttgcagtgagccaagatcatgccacggcattctggcctgggcaacagagaagattccatctcagaaaaaaaaaaaaagaaaaattctgctggtaggcattctatgcactgagcaaaggagagatgtggaggcccaatttaaatagttacagctgctagctcctaaggtctatcttactatctgcaccgtttgcggggagtcagcttaatgatagtaaactgtgctaaatgggtctagaaatatccaattaatctgtttgagatattcggaaactcaatagcttgctgaagtagcaaacttgaatccttatttttattttaaaagggagtaaagggactgtagataagtaaaagatgctctgcactgcgcctctctggtaccagtccctctcgtttaggcagcggccacttcccgcggagctgttcacgccaagtgaccctgccactgcgctgctcccaccaccccatgtccaccccgtcctcggacgcctggtctcagcacatcaccggtattctcttcctcttaccagtaattagtttgagactgtgactcacttctgtccaacaagatgtgaagggaagtcttcctgggaggtttctggaaagcgttctctcacttgtgatagccctgggaagaaatgctccccgggtcctcagagctttgttgtggctggacgcatcttctggaactgcgacagcggaggaggaagccaagagagtgaaccaaaacaaggaagggcggagggcgggggaggcctgcaaaccttacggcttatttccactgacatcagagactcatgttaataagtaacaagcggctttgtttgttatgctcctcagacacgcggtaaggtagacacacagaaatgcacagctgtacgtatttgtcttgaaggctagaatttactttaaatgtgagtggttttcccaggaaaaatttatgtctgttctcttgaggaataattatttcctactcaattttatctatcgatccatccatccatccatccatgcatccatccatccatccatccatccgatacagagcctcgctctgtcgcccaggctggagtgcagtggcgctatcttggctcactgcaacctctgcctccccagttcaagtgattcttgtgcctcagcctcccgagtagctgggactacaggcccgtgccactacacctggctaatttttggatttttttttttttttttttttttcctgagacagagtcttgctctatcgccaggctggagtgcagttgcgcgatctttgctcattgcaacctccgcttcccaggttcaagtgattctcctgcctcagcctcctgagtagctggtactagaggcacgttccatcacgcctggctaattttttttttttttgagatggagtcttggagtctcgctctgttgctgaggctggagtgcagtggtgccatctcggctcactgcaacctccacctcctgggttcaagtgattctcctgcctcaacctcctgggtagctgggagtacaggcgcgtgccaccacacctggctaagtttttgtattttcggtagcaacgaggtttcgccgtattagccaggatggtctcactctcctgacctcgtgatccgcccgccttggtctcccaaagtgctgggattacaggcatgagccaccacgcgcagccctttttttgtgttttagtagagacagggtttcaccgtgttggccaggatggtccgatctcctgacctcgtgattctctcacctcggcctgtcaaagtgctgggattacaggcggcagccaccgcgcctggcctaatttttgtacttttaagtacagacggggtttcaccatgttgtccaggttggtctcaaactcctgacctcaagtgttccgcccaccttggccttccaaagtgctgggattacagggttgagccaacgcgccctgccctcaattatatttatttctttgcctttccttacgtctttaactcttcacacttttaaaaaagttattgccttccaaataatatttaggaatataaattatttgatattaatccagggtaatttcgatttgtttttaaaaaaggggaataaaaacattattattcagaaggggttaaatacaatgacaaaaactgcaattcagaattaatgaggcgttataatagggtttgttaaaaaaattatgaggtatttaaaatagatttttggcatatccttttgtgacttttggatagacttaagacttagtttatatatcaatagtgagtctgtataggaaaagaatataatattcagtgactgtcaaaccagtgactggagcagcttggtatgaagcgcttcttattctggtctccctaatcagtgattttcaattttgaaaacttttttttgaagttgtgttgttttatttttctgcagaaatatcttctgcttttcattttaaagtatatttgctatttatttgcaatctagttctcatcattaaaagcagtactaaaatcttatcccagaatttataggttgtgtcttttgtcctttttttgtttttagtatttttctgtcactttacttcctcaggtgaagttttaacaaaaacgagggaccatggataggaaagtaggaatgaaacagtttacagggttgaagttgtggtataattctttttttttgttttgtttaaagacagggtcttgctctgttgcccaggctggagtgccgtggcgagatcatagctcactgcagccttgattgcctgggctcaagtgatccctccagccttggcctcatgagtagctgagactccaggcaggtgccaccatgctcagctaattttttttgtttgttttagagatgggatttggctgtgttgaccaggctggtcttgaactcttggcctcaaaccatccactcgcctgggtctcccaaagtgctgggattataggcatgaaccaccatgcctggcccatggagtaattcttgtggagttggaaggtagaggtgtgtacgtgtctgtttctcaaaatagtagcactagccaggaaatccatgaatttgcatatttttccccaagttcagcccatttgctttggtgagtttggggttatacttagagtgggtagtataaggagtttctgccctacaccttagcttaagcaatttgagcacattgctttttgagttcaccaccaaggatccagagctcagaggcagtctttcctgtgcagataagagtgcaccctgcctgcacctcacggtcttgggctctgtggcttctctcctcctgccactgccccttattgtgggtaggctggaattccctatggtcctttgtttggggaagggggatgcttggatgttcccgggtgtcacctgtgcatgccccctatgctgtcctcccacctgccctgtcctacaagcatgacctgcacccttctcccacacacccagaccgcaggcttattcttactctccctggccagcccctcttcttggagaggagaaaggatgatgtgaaaataagatctaacattggggctccccagcgacttccacaaggagcaaggagctaggtgcatgtgtagaccccatgggagctttagtgttagataccgagtttgctagatgaaacatctttttaattgaggtggtgcagatgtattgtttgaacactttagacactaatgatgaactacttggatgtacatttttttggtttttttttttttttgctatgaaaattagaaaaaatatttatccaagacagtaagtattgaaaactgatactggtgctgtatggatcactattattgtattatttgaaactgtttggaaaaggtattgtagtttttagaaaaacaaagcaacctgaatattaaaagtctgtgaatttgagtaaaaaacagtccacataagggaaaaaatatataaggaaggacaatgaagttttgaaactgttactataagaaagctaaaggctgagcacagtggctcatgcttgtaatcccagcaatttgggaggctgaggcaggaggatcgcttgaggccaggagttcaagaccagcctgggcaaaggagtgagacctcatctctactaaaaataattttttaaaaatattagttggacatgatggtggccacctgtggtccaagctactagggaggcttgagaccaggaattcgaggctgctctgagccgtgattgtaccactgcactccagcctgggcaagagtgagaccctgtctcaaaaataaacaaaaaagaaacttaaagattttagtctcaattttctacactgaacccatctttagatcatagcatgtataaaattaaaaatgggggaatatcaacattattatatttaatgctatagcttattattgtatttaataagctacttgtttaaagatctgggatctcttgggtccacagactgagtctttctgaaggtgctttacacgatgtagctgccagggatctaggtcatataatatcctcaggatgggatttgaagacatttttccagaatttatcttttgtcatattggattttatttttaaaaatttcctctatagtcaaaatttatataaatatatgattctgatagtaccatatatatttagatgggcttatactgggcgtgaacaaggttaataatctttgtgaatatgtgggttatctccttattttacttattcttaaggaaaattaatttcactgtttaccaaagaactgatagctaaacccaaaagatttcaaagaatgttttgtttttgaaatgtttctatttatcactaataaaacgggtatatctgtttaacttgacctatctttggtcttactaaaacaaaatcagctagaccatttcccaaataatcatgcattcaatactctttttctctctctctccctgctccctcatctctactcctttagaactttcagaacattcttttgtgtagatacagtgtttcatgtctgttattgtttctcactggtcgttggattctttcatgtgaccacctttttcacgtttgctctgattgcctttggatgcgcctaactgtgtgcttttcctgttaaggaaaagaatcctgcatgtttttttctcatcgaataacaatgttaaaaacagaaaagggttgtttttcttctttgcagtaggcattctgtagtagataccttgacatacttaaatttgtgagatgtgtctagacgaatggaagagtaatatctcatattaatatattgctaataataagataaaggtttcagcttcctggagctgtccatataatagaatttgtacttgttttttcatttctgagatcctcatactttggggttttttttatttttttattttttcgagacaaagtctcgctctgtcacccaggctggagtgcagtggcgcgatctccgctcactgcaacttccgtctcccgggttcaagcgattctcctacctcagcctcctgagtagctgggattacaggtttcctgccaccacacccagctaatttttgtatttttaggagagatagggtttcaccatgttggccaggctagtctcgaactcctgacctcaagtgattcgcccaccttggtctcccaaagtgctgggattacagatgtgagccaccatgccaggctctgagatcctcgtacttttaaataaaatgttaagatacatgctttatgcttttgctgcctctcatgtttcatgaatacaagtaaacccatgagtaactcatgaatacacataaacttctgggcctccaaacgatgccctgccagtggccatgccacaggaatcagaggctgtacttcactttgtggttgctttattattccaccattataagctttagtagaaaatgtaaagagggttgttaaactgaaggagtgttgtctcaaactgaaggagaaaagtagtgttgctgctgtaagatgtacataaactaaggggtgtcttttctaccatccagttagcaattaggaaagtccttctttgctcataccattccaaagggagtcatcttattctttctctaaatttccttacaatggaggctgctacagtttaagtatcgaaggtccttttttttcagatttcacctgcagtgcctataaatttgggggaatgccttttttggggggtgaccaacatactcagtggatcttggacctaccaccaagtgaccttccttgctcacctgtaaggctgagaacaccgtaagcaaagtaccaggcttctttccccaaaagggctttgtaagcgttggcgccataaaatcaacctgaggacttaggtggctggttatttctgagtaagtgaatatcactctcaaatacgacattccagcaaaggccatggttgcatagccactgtttttagttatgtcctggtaactaggaagatggattgttttttaatctatgcaaataattatattgcgctgaaaaaaatgatactcaattacagtttcacaattctggagggatcaggcagggataataagataccatttccagatgtttcctttctgtttataaaagcacagtcgactgaattgttaggagatacaggcagagggagaagagaaagggttccttatgtatccagaatatagagtgttaaaatagcaacaatactgtaaacaaaagccgcagtcctccttcagtagttcatctgggcctagtcattaatttttgttccacttgatcttgggttagcagtctcatgaatccgtctgcttctcaatgagggttatagaaatcctcttcccctggtggggtctcagcattatttagacaatgccataagaagcctgtacccaaaagtacccagcatagttcttctccacggggctctaacacagccccctcttggtcgaaggtaagtcactctggcctatagctaattgcagatgctgatcagggaagtgtcagagaaaaacagaaatctgtaggtgacaaaagattttaaatggctatggttctcgtattactgataattttcaaaactaaatttattgagagttcattacaacagtattggcaactgataagtaaagttagttatggtgtgcaaaacagagtcaacccaaaaaagttctagatacagcatctagaaacaccataattaaccttattttaaaagaacagtggatgttgcatctaatttataaaaatggaagaacataatctttacagaaaaaatcttcagatataacaaaatagtcccaagacataatatacaatgaatatgccaagcatataattagaatagaccaagaatatcacatcaagagggttattttagaggggacataaacacctatgtattaataacatatatttaacctagggctggctatcttttttgatgtgacaatttgtcccatataacttatcaatagtaacacatcaaatggatctcctaattatttcaagcatctgttttttattaaagtaaaagcacaaatactttttattttccaggtatgtctggggaatcttagacagttttttgttttgttttgtttttttgagatggagactcactctgtcgcccaggctggagtgcattggcccgatcttagctcactgcaacctccgcctcctgggtttcaagccattctcctgccccagcctcccaagtagctgggattacaggtgcctgccaccatgcctggctaatttttgtattttttagtagagatggggtttcgccatggtgtccaggctggtctcgaactcctgacctcaggtaatccacccgcctcggcttcccaaagtgctggaattacagggataagccaccatgtccagcctcagacagttttaagtacaaaatatatcatttaggatttgatttgcggaaggcaaaatatcaaaaattatcaagaaattttgaatacctgattccaataggatcatgtaacttagaaacaatttttgactacctatttaatcaaagtgactgtaaaaggttttaaaagtaaacagagaggtaacatgattgtaaagaaccttagctctttcctaagagacacgatttcttgaatactcaagggtaaaataaagtcaatataaaccatagaaggttattctcataaaacacagaatctttggaatctaagccaattatacagaaaaaagaataagcctttattttttaggtgaatgtggtaaacagtaaaccaaagaaacaggctcatcaatattgggtaaacttttctttgtttttaaatgtttagtctttagttttaagagatcatctgcattttttctgtaataaacttaaaagatatccacttatatttcttcagatttattaattctgtagcaatttaagcattgaaatgacagtttttctctcaatccttttttttttttttttttttttttttttgagacggagtcgggctctgttgcccaggctggagtgcagtggcacgatcttggctcactgcaagctccgtctccccaggttcacgccattctcctgcctcggcctcccaagtagctgggactataggtgcccaccaccatgcccggctaattttttgtatttttagtagagatgaggtttcacagtgttagccaggatggtctcgatctgctgaactcgtgatctgcccacctcagcctcccaaagggctgggattacaggcgtgagccaccgcgcccagcctgtctcaatccttaacaatgctatatttgttgtatttcatatgtttagctttctcatggagaaaaagaaacataggcataaacctttatactatccgcctgctggtcctgcaacatgagtttaataaagcgttcctgatacttaaacaatttctatgatgtcagcagagagatatcagcaagagtgattgtaaagtagctagccttataagtcaagagttataatctttgatccactgctcaatccatttcaagatctgatctacattattttctagctcttctggtttattgctgggcagccgatgcacaacttcttccttgtaggatgccgtggcttcttcataaagaacttggaaaatctcacactgaatattgtcttttagtttcttctcattataacccctcatttgaagtatttcgtacaatatgttggcatctattctcaacacaaaaactatgtgaaaccagcgttcagggaagaaatcacaaccgtggtaatcaacaataactccacattctctcatttggttatctaactcatcagctactctgtcttcatctaaaatgggacaattatactcttcatcatagtcgtcatacaattgcttttctcaagctaaatcacccacattaatgtatttcaatcctgattttgattctgatatgtggtttttccaacctctggtgtacctggctttctatgacacgtttctatcaccaagtcagaacaaagtgacactttaggactgaactcagggagtctgtggggtcaaaactaatttcataatactactaagactttaacatgcaatgggttcaccttgctgtctccaaaaaaaaaattgcaccactgcactccagctagggcaacagagcaagaccctgtctctcaaaagtaaataaataaataatttaaaaaattattgttaaaaaaagtttgtcaggttaatgattcaatttgattaagcacaaatttacattttttcatagtcttaaactttacgagtaacgttcacttatttgatcagtaaatctgtatagcttttgtaagaacatgtaaaagtagaatagcaatgtatagtgtggctgggcacagtggctcatgcctataatcctagaaatttttggagtccaagatgggaggattgccgagggcaggtatttgagaccagccttggtgacatagcgagagaccccatcttaaaaaataagaataataatacttaatgctgacaactcatagaagacatgactatttttattaaaccccaaatattcaactagtctcatttgccaaatatttacctaaatgtgtgaacttgaattcttaaaacatttacgtttctataggaatactttttttagtgctgttgaaagtattattggaagttcaatttccttaatttctgggaattttaggaagattcaatttataggtgtctctttatttctaagccagtcagaacagaacatccttaagagctatcacattctcacttggtaagaccatctcatgatggttatcccaggatgagagacaatagctgctttgaaagttcccctgccacactgggcttccagtaccagtgcagctaatgaccctgccctaacagcaaatgctggggagcagggtgcaagtgtttacttgggtgcccttcacgggcactccttttacgtggtggacagcctgatgctttgttctctaaaccagtatcaggcattcctctcatgggagatgtgcttatcctggcagacgcccttgtggctcttttctgacccctctccagtttatgactgcctgaccatcgctctggtgctcagagcctgcccttgtgttcctccccagcatcccggggaaaacccaggtagcctgggagagcccctggttcttcagatggaatgtgcaaattcagcacaccaacacgataggaaataagttccaagatttattacttccagatcctagagagggagggcgccatgagtcgggagggcaatgctctatccccaggtcaccagaagaatgaatgaagtgtcaggcatagagcaagagagagtgggacccatgggccaccacctttactgggggccagggcattgtccaagcaggtttcctgcagggagttttagttggtgagtttaaaacaggcagccatgagtttcaggatcacacagcaactgagaggtggtccctgtggcatactccacagtccatgtggggtgtggggttggcagggcagccaggtagactgtctcttagagaggccgtcaccagaaagaggaggtgtataaggcagatccctggatcaaccccattgaggactgggggtggcaggtggaagctgtcgagggaaactaagccctgtttctggtatgagaaggttaaacttatcatcaaaatagatgccaaggctatatgaaactgtcagtattcactacagtggcatttccacagtacaatacagacatacaaacagacatagataatttgtaagctgtaattctaaaatttcaggccaggcgcggtggctcacctctgtaatcccagcactttgggaggccgaggtgggtggatcacctgaggtcaggagttggagaccagcctggccaacatggtggaaccctgtctctactagaaatacaaaaattagctcggtatggtagtgggcgcctgtgatcccagctagttgggaggctgaggcatgagaattgcttgaacccgggagatggaggttgcagtgagccgagattgcaccattgcactccagtctgggcaacaagagcaaaactccatctcaaaaaaaaaaaaaaaagaagaagaaaaaaattcagtcatagaccaaacttaaaagcagaaatataaaattttactcagatgtgtacttcctgatggcatgaaattcttaattgttttgaaaccaaagtagaaaagcagacaaacgaaaaatactagcaaatcagattctgttatctttcacccaacagagacaagatctctataaaccagcagtccttccccaaatacgtagtatacaaaccgcttcatgtctgtcattttcgtcaaccctggggtccttcaaatgccttttgttccttctcatttacttcaccttgacttttcaagacatattggttatactacacagttggttacatttgaagtatttcatgtaaattacaaaagtatatgaataatgtgaattcatttttgtttatatatgtatatgcatgcatacacatacacacacactcctatagagtgaacatttggctgaatatactgccaaattgttaaacaatagtcatttctagctggtggaattacaggaaaatttgtgtttctgattatatatttctatagcatttaaattttttgcaagtcagcgtgcatttcttagataagcaaaaaaaaaattaaacattttatttaaatttttttcaattccagttgatagcagatgtcaatagaacaaataagttcccttatccatgcttctgtatgtgggggattcacttgacaggtgcaacagaagcacaagcattattgtgcacctgtgtctgaaatgagaatgaggctgcctagaagtcttgagaaaagtggctgacgagtctacaaaaacacccttcttaccctttctcactttgaagtgcatgaagacgttgacacacttggaggtctgctggctaactggtggaacagattcctgggggaaatttttttgttttgctcttgtacctcatgtctggattattttggattgctttggggacagtatctgagtttctatctcttggcctgttttttccaggaatataaaggttttttttctttgacatatgcttaaatgtttatttttaagtgatgtaacttttcaaaaaacttattacagtttatttctgtgggaaaaatattttttatgtttttgactgttttttgttccttcttgtttgaaatctctagccaacaagaacattagtcatgacaagcatgccatctgagtaagtacttgttttgatttctgttcaatgtaaaatgttaaccttttctctcttatactctaattctgggtgcctttaggcaacttgtcaatctgtcctgtatcacttttactttataaaattaatatctgagttagaagatcactgaaaattaaacatgtaccaaatgtgagcgacttagccttgaaaactctggggttgtttaggcagcattaagaggtgtgtgctcgttttggtgttcttttgcttgcttgataccaaatagcttcatgaatgttcaagaagtggaacatcattgaccaaaacatttcccttaaaggtcttaaagcaatactgcagcagaaagctttccacagcagtgttaaagttgctatgtatgcattttgtggaagggttaatagcttgttggcatgctcttatcatctcccttaaacatttaacacaacaaagaacatccaacaaaaatacagtgctatattctttgcaacagatttttgaattcctgtttaaaggggaaaaccatgtttttgatatcaatcataggttttaaggttttaagacatccatcaaaacattggaacatttcagtgaaaaatatgctgcagagagggcacctttagaacattttcagtagtgggatccttttcctgcctggggcttagaaataaaagcactgatcatcaaacaccatacattatatagtgaaaaagggggtcactcaaaatttttgtaaatatattatgaaatatattgaacattctaaatagtctaatacagaagcgaatattgaatatatgtgtaatattttttaaagtctttgtatttttccaaaataaaagaaaaattactagttaactgcttattttctcattcaagatttaaaaataaaacttttcatttaggccgtcttcttgtcttactctttttttctccacatggacttcttgtgatacttaagaataagacctggacattctgattttatgtggattagctgagccttgcagagacacttgttacttactggcacatccagcaagcagctgccagcctcaggatggagttctagggagtgtgtagtttagagctttttactttttgtttttgtttttgttttcttttatcatttttgcctttatttctttccaagtttaattatttttcttgactcaagcacacattctcgggttgaagtagtgatgaggcccagatcttgactcacacatcttttctaccctaaggatctcttaagaatttaaaagcatgatataattcagccctttcattttacagataaagaaacaggttttgagatggacatacctaagatcactagagataaaactaagaaggctgggtgtgttggttcacggctataatcccagcactttgagggtcccaggtggacatattgtttgagcctaggagttcaagaccagcctgggcaacatagcaaaaccttgtgtctacaaaaaaatgcaaaagttagccagacttggtggtgaattgcctatagtcccaactacttgggaggataaggcaggaggatcacttgagccctggagatcaaggatgcagtgagccatgattgtaccactgcactccagcctgggcaacagagtgagaccctgtctcaaaacaataaaataaaactaaggaacaccatcatttggaaggaagagtgttagaggcagtctgtataagcatagacaataacctcttcccctttgtaatataatttttggagaggagagatgtttatttctttttctatttatttatttatttatttatttatttatttatttatttatttattttgagacagagtctccctctgtcacccaggctggagtgcagtggcgcaatctcctcccactgcaagctccacctcccgggttcacgccattctcctgcgtcagcctcctgagtatctgggactacaggcacccgcgaccacgcccggctaatttttttgtttttttagtagagacagcgtttcaccatgttgttgtatatatcacagtgtggcttagaaagccctccattggggattttttaaattttctgggagagagagaaaactaatgtcagaactaatggcatagaaaggttattataaaagggaagaaagaactgagggttgtttggtaaggaagttggacggaaagaatatatttttttaaaggatattttaagtattaagggaatgacagagcaggagataagccataatggtcatgagctttgtgacaaataggtcccagatttgatttgatgatttaataaaaagggtcttttttcccctcttagtagaaaaactatgtgttgatactcaataaatattacattttcaaaataaaataagtgaggttcttggttctgagcatgcacagataggttcaaataggcctgaaaaacaaatcattgccccagtgggaagagtgttggtctgatgtcaggggcctggttcctttttttcttttttctttttttctttttttttttttgagacggagtctctccctgtcgcccaggctggagtgcagtgacacgatcgcggctcactgcaacctccacctcccggattcaagctattctgtctgcctcagcctcctgagtagctggaacaacaggcgcgtgccaccacgcctggctaatttttgtagtttttagtagagacggggtttcaccatgttggctaggctgatcttgaactcctggtgatccacccgcctcggcctcccaaagtgccgggattacaggtgtgagccaccgcgcccagccaggggcctggtttctgatgctggctctgtccctacccagcccagccactgtgggaagccattgacagcctgtgggcttgtcttctcagccattaaaatagaattgagatctgaagtttatttccccaggtttcaaagcattgattataagtcagttaagatatacgtaccataaccaaaatcagtttcaaattttggctttctagttttattagtactaatattgagtgtaactgctttgatgggcatgtgcaacaaagtcattcattttgttaatttttcccccgatttgacagaaagcagaatgtcgtcatccaggttgtggataaattgaaaggcttttcaattgcaccagacgtctgtgagaccacgactcacgtgctttccgggaagccacttcgcaccctgaatgtgctgctgggaattgcgcgtggctgctgggttctctcttatgattgggtaagccctgtgtgtgaactgcgtattttaaaacaaggcattttgatagagtgggtcaccctgaggtgccgacatcagcactcaggccggcgtgcacccttgtggatctgcacactttcctgtgagctgggaacacccgtctttcctcctgttggtctcccgtgggctgctacccttcaaccagggccaagttctggggcaacaggaggacggggagggtagagagcaggaagtgagtagcctctaagataaagcagaagcaagattacaaagatgctgaaagaaacgcaagatgcatgttctcacagtcaaagagctttcctctatgtgtgaccaagaaacattgtgagctgtggtggtggtggtttgcagagccaaaataattcagtgattgtttgtacagatggatttacttaggatgaaggatgttcttttaatcccatttggataggttttatcctatgtatatctatctgtaacattatttgcccttgtttctgtagattaaagatagcttttaaaaatacataattattttcgttattcataaaaactgaaatgaactgttattggttctattattactttcatcctcaacctaaggttgctccaaagcattcctttctggtgacagtagcatcacttgttacgtatgttaccattctgcatctgtggtatccgtcttccctcctcctctcccaagaatgtattctattcatactcatactgtgttcatttaaaccagtagaattataacatgcaaaagctacacatgtattttcaagaatggccgtcgtcttttttccgtgttgtgacagaggttaaagagattagtgcttctagttgtgaagtggaaaacgttgaaattccaaaagtaagcactgttcatttgcattggtggcaatgggggatcaccttacctgattatatattagtactgctttatgtttatttggatgaaagacagtagtgcccctctcatccagggttttgttttgtgtagtttcaggtaccatggtctgaaaatattaaatgggaaatcccagaaaataacaatttataagtctttaaatgcattcttttctgactagcatgaagaaatctcaggttatctggctccattctccctgggatgtgaatcgtccttcagtccagcctgtgcatggagtaggtgctgcttgccctcacttagtagccatcttggttatcagatagaatctcgtgattttgcagtgtttgtcttcaaggaacccttatttggcctaataatgttccccaagcacaagagtattgatgctgacaactttgatatgccaaagaggagctccaaggtgctttctttaagtgaaaaggtgaacgttgtccacttaatatggaaagaaaaatggtatgctgacgtagctaaaatctatggaaaaaatgactctttgacctgtgaaattgtgaagaaggagaaaaaactgtgcatactatatatatagggttcagaactatccacagttttaggcatcccccagggggccacggactgtgccccctttggatagggtggactactgtctctttaataactctagcatcagtgaatgagttctgtgttttatttctctccaattcaaatcgtctctgtgtcttcatctgactactctcccttccctcaggttttggaggaaaaaatgttatttctaaggatatgcatctgtacaggattccttacccaacttattcttctgggacttggagcagtccatagaggtcagacgtgagaacgtactgcctttgctgtcgacatggatagagacctgctccctggttgtctgcatgtctctgctcagtgttctgctagtactccacagctaatcatacatagaaacagaactgggtgaaattttaggttattgtatctcttctgggattacctgatatgataaaggtgggcattaaaacacattatttaataaacttctcacctttagtctagactccttgcctggagggaagaacctggggcactcagacacataagtgaatgaatgaggtacaaggcaatcagacaagaaaagataataaaaggcatgtaggttagaaaggaagaaatagagttatctctatttataaaccacacaattttctatgtagacaagtcacaagcaatctacaaaacagcaattagaggtgacagctgagttgagcaagtcatccagatgcaagaattccattgaaacttcagtataaagctaataaaataagtgcaggatctgtgtgctgaaaactacaaaatactgattttaaagctcaaagaactaaatatattaaaagacatacaatgttcatggattagaagacatagtacagtgaacatgtcacttcttcccaaaatgatgtatagatttaacacattctcattcaaaatctcagtggactctttcaagatacagacaaactggttctaaaatttctatggagatattaaggagccagaatagccaaaacaatttagaaaggaaagaacaaggaggaggactggcactacctgcttttggggcatcctttcaagctgtggtcctcaaggcagtgtggtattggtggacacacagaacagacagagaatccagaaatagacccccaaaatacatcccatgggttttcacaaaggcatgaaggcaattcagtggagaaattcagtcttttgaacaagtggtgctggagcagttggacatacacaatcaagaaaaggaaccttcccaacactttgggtggatcacctgaggtcaggaattggagatcagcctggccaacatggtgaaaccccgtctctaccaaaaataaaaaaactagctcggcatggtggcacctgcctgtaatcccagctactcaggaggctgaggcacaagaatcacttaaaccggtgagatggaggttgcaaagagccaataccatgccactgcactgcagcctgggtgacagagagacaccctgtcaaagaaaagaaaagaaaaggagaggagaggaggaaggaagggagaacctcattctataccttacacgagccacaaaaattacctccaaatggatcatagacaaaatttaaaggtataaaacttctataagtaaacatacaagaaaaatgatcttggtgtaggcaaagagttcttagatacaccaaaagcatgatgaataacagaaaacatagataagttagatttcatcaaaattgaaagcttttactctgtgaaagatattatgaagagatcagaagaaaacgtttgcaaatcttatatctgacaaaagatttatgtctggaatatataaagaactcttaatactgaacaataagaaaacagaacagctcaaacaaaaaatggcaaagaaaagatttgaatagacagtttactgaggacacacagatggcaaataagcatctaaaaagatgctcatcattattgctcacttcagaaatatagtgagatccactacatatccattagaatggctaaaagaaaaaataacagtcgcactctagcaaggagccagggcagctggaacggctgctggtgtgtgtgggaagtggtccagccgctttgagaaacagtttgacagtttcacagaaagctaaatgtccactcagcagtcccactcccagatatttgcctcggagaaatgaaagcttgtgttcacacagagtctgtacgcgaatatttgtagcagccttacttatcatcagctggacctggaaacagcacagctgtccctccagtgggtgaatggatcaaccagctggaccaaccatactgtggagtgtcactcaggagtcgaaaggaatggtgataggtacagcagcttgcatgactctcaggggcatcatgccaagttgaatagctggtctcagaaggtcacatgctgtataaggccatttctttgtcattctagacaaggccaaactatagggaaggagaacagatgagtggttgccgcgcattaaggtgggagtagcatctgcctctgcagaacaatagcagctgtcacatctttggggcattggaattgtgctgtgttgttagtggcaatggttacagaatccatgtattaaaacacagagaactgtacacacatatgcacacacgagtaaatcttattgtttctaaatttaaattaagaagaatatctaggcggggtgcagtggctcatgcctgtaatcccagcacttttggaggccgaggcgtgtggatcacgaggtcagcagttcaagaccagcctggccaagatggtgaaactccgtctctactaaaaatagaaaaattagctgggcacggtggcaggtgcctataatcccagctactcaggaggctgaggcaggagaatcgcttgaacttggagggaggaggttgcagtgagccgagatcacgccactgcactccagcctgggtgacagagtgagactctgtctcaaaaaaaaaaaagtatatcttacatatctaacgtgctttccaaatggagatgtttgagcactggtaggaccgggctagtgtcttggtttcagaactaggtttccttctgtgtgctgaagtttacaggctcctgtaccttcaactgctgcctctgtacctatacttcctgttagcactgaagcttcatcccagcttttctatcttaaaaaaaaaatgaaaagaatttaaaaacataactttctctaaattgctctttgccctctgtgctacctttttttcccctcattcatggcaaaacgtcacaaatgtatgtctgtattgcccttgccttactgatgatgtcgctatttgttaatagtatcaactcttgggagattgcgaaggctcaggtggcctatggcttcaggtgaaatatctgtttgtgtgattacaaggtaaccatgatggcagtcaggtatatcacacatatataaatgacacaaacagatataaatatatgtttgtgtgattacaaggtaaacgcaatggtaaccgcaatggtaaccacgatgactctcgctggcacaacaggagtattgatgttcacaggttgctcctgacttgcaccctcaaaaagtttagaaacaagccgagtcactttctctgttcatctcagtcttcaagaagacaaagatgactgctgcttcttgcatggcccccctcctttaacttttaaataaattgaatagtacaaacataagaaatttgagagaggatagttgccaccaccatttacaaagccattctacataatttttaaagcttagcacccactttaatatttatctatgtcttgcatataacttcagatataaacttcacagttccaatttcttttagggtcaagatttaaagtatccatatcatatattatatacattgactttgtgtacaaggaatctctctctctctctctctctctctctctctctggcactctcgctctctcgctctctcgtcctcctccttctaaccctgtctccaatgtagttgggggattcttaaaatattctctttggctagcagtataaactggcctccaagaaaaacactgctgagcatgtttttatttcagggtttgtgtggtattctctggaaatttcttgtaaaggagatttgtagcagttcttcagaattagatggttgtatgtggcccagctagtcttatcagaaactgtggcgattttataacaaagttcagtttgaattttgacttaatatttttgagaagtttattggcaatttttccatgtttacagcagttcacacctccagtgttagcgctactgttttcaggaaagagaataatttatgtttttcctccttcatgactgaattgtctggcagatacatggaaatagaaaaccatgccaggagttgccgagcttcctatttatgggagacaggaagtaacacaacagaaaaataaagaaattaatttgaccaaagtgtccctttagactcacattgttttgttatgtgttgttcaagcatagcacaatttgaacctttaaatactctttatcccactctcacttaatttgatgattcctgcactttcctgtgacttgtctaaaattctactttccctcgaaacccttttgtggatgctaacatacaagcagagtgtcctgtgattcagtcttccctttttccagctaccactccgtgtcactctgtccagcacagtgaggaataactcagcctgtattcagattttaatattttgattctgaacagcttatgaaaaggatctgataatagagatttaaagctaattcacttataaatacaagtgtagggcttaaaagctaaatcagctttacaacaaaatgtcaaggccgctaactatcaacagataatctagtgttttcttaatcaaaaatgatttcatgatgactattttcttgagataatgtgatccacattgaacttagtaagcagtgagtcagatgagatatgtttttatcagtggtgagcatagaatcaatgaactgttagaataacacactcagttcattccgttcacgcctctcattttacattaaagaaatgctgagccgctctcctaaaattataactcatgggagaaccagaactggaatctcagcttttcactggtgttagttcatcaccctgcattcctaagtctgttcaaaagggatcatcttgaaaaaccattctctttttaactttcagttggcagattaacttcataactcatgttaggaagaatcttcagggacattgtacttggtgtgtcacactgacactgagtttctgagggtgcccttcaggtctctctggcagacatttattgctcgcacttgcaagctgactaggatctcaggcctgggtctctgaactttcacggcttgatttcaaagtcctttttatcctgctacagattataccttggtaaaggactttatacttcacagagtgttttcacatgcactgtctcactggatcctgacagaacatttttgcagccgagaaggacgctgcaaataattagtgaatttagtgatggagactctgggcaaaaatagcttgtctgacttgaacgtggatcttagaaacacatctctgtcaaggcattgttttaaggcagtgactatggtcttacatttatctccaggacacctaatttatactttttcctgattaaaataatggattctggttttgcccagacatagaacccacagagtttgtctgcttctttcacttgaggtggttcctgagcagtgccagagctcattctctgcggaggctcctgcaggctgcggcagcgtggcctctggccgctgggagcatgggaagcaggcgctgcggtctaggtcctccatccccctgtctgctgctcctggcaagaccccaaggtgcgcatttcccaggttggagccgctgtgcttcccaggaccataatctgctgattgaggacagataccaaaaagtgattcatctgtaaaattgagggctgtggtgctgccctctaggaggacatttggaaagatgtggagaaacctgtgagtgctaagaatgactgatgttaaagtttgaaagagtcaaagtgatttttttagtgggagaagactgtggagtcaccctgagatgcaaccacaggcttgattagaaataaagtttgatcaccattttcaaatttttacattaatattttttaattttcgaaaggtgctaaacagaatctacttaatgcacctggcacagaaaaggcagtgcccgggtcctaaggctgcacctttgcaagaaagagaaatacctgaggcaccgggagtgaggaggacaggtgttggagaaggctgtagggccccagtatggctgtgtagttcaagacgagggatgcagaagccatcggactattttaattacagagtggcagcttttgtctctgtggcctctcagcaaagaatggattgcagggaggtaagaacagggtgagaagcaggaggcagctagggtcatcgaggtgaaaaatgactgcggctgtgtctagagggggggttgataggtggagaggagagagcaggtcggcgcccttcctaggaagatctagtggaatctgtaacgtcaggtgtgtgggaatggagaagtcaagaagactcccacccaaattttttcctggggcgactaactatagataatggtgccatttgcagagttagggaattctggggcagaagattgtgtgcaaggtttggggtacaataaaaaattgatgtaggcatattaggtctgagattcctactggacattcaaatagagatactacatatcagattatatatatgtacaaatattcagaggaaaggttaactattcactccagccatggtacctggaagggagtgtgaatgaagaaatgaagaaaacagtgagtttaggtttgatctctgggctgtgcccctatgcagaagtcagggggaagggggaggcagggggacccgggaacggctagctagcaacctgggggagacaccaggggaacatggcatcagtcagaagggggactgtctcaggaaggaaggatgctcagctgtgctgagtgctgctggaaggtgaataagaggagacagaagccactgtttgatttcttcaggtggatgttgtcagagaccttgaaaaaagcaggatgaatccaatgactaagacagttgaagagtcaatggtacataaagcagtggaagcactagggttatgtgtaatggtgcgatttgctgagttagggattattatcagacatattgctgatatgttattcctagacataatgctgctgctacatcagagagattggttggcagcgaatggggcactgtgaagtgtgactcgagccttctcgtgttgccaactgcaacacagatcatcgtcctagtgcttggcgatgtggttgcattatggtgagttgagtgtggccttgggaagcatctgaatctgttggctgagttatcagggaaaaaaaatttaaaaagtaaactaagattatgtatattaatgaaaaagttgctgtatttggcaaatactttaaatggataaggctaaaaaccaacaagtcgagagggtacttgttgccacccatccttttccaaatcatggccttcaaggatcacactgttggtctttccttttcttttaacttggatcaactgtgaagtaacacaggtcttcagtgtagatctcagttccccaacatttgccttatgactgagacctccaggacgtcaacttggtccatgctgaactgcagcacaaattccaagctttgaccatacctcaaggtgcactttaacctttgcagtgttctgccagacatctgaactttcacttttgtttctgacatctcaatcacacagttctcactgtaaatattaaataatagcacagaatattttaacttcaggtattcattggaaaattcaaccatggtttggttttatctgtcacttcaaaaactgtcttcagctgtccatcatttagatgtcatttagatgttcctcagggactttggggacattgttaacaatctgttatttcaaggcttctaaactctatccccaagttaaaatgatttccaaggaacatcatacttctcttacagtctgtgtgtaagcaccctctgtgaattcggttttagggacaatgttagcttttgaagagagctgatgtaagaaatactagattttaggaaactgttgtacttttttcaaagctatatttgacgacattgtacattttgctacctgatacttttgatgtatgatccacctaatgcctttctcctaaaattaatttccaatgaattgaataggaattccaaatgaaatgaatttcataggaaaatctcatacagaaaatttgttaggctgtccttaaccagagaatgagaattatgtaatgcggttttgtcagctagagtaacagcttgccataggttcataatagagctgttttttagttctttttcttgggttcttgtttctgaaagaaagtttctctgccagaatattgaagttgtgcctaagttaataatttaacaagcattgtatatattaataatataatatcaataatgctattaatcattaataacaattatttaatattaatattaaatacttaatattaaatttttagaatattaaaatttaaaatttaaaaaataaaatttatcaaaaaaaattttttttttacttttgaagcattggttttattaaactttcaaagtagtatggcaaaaaggtggccacataccaaatagtgtcatacatttcttaaaatctctcctagcaaataaacttaaattgagatcatgagtcagttgaaaagacaatttaatttttttgccatacaattaaagtatttctgagaagtcagagtgctttgcaatgtttggtgaataatttacacaattccagaataatgtctcacttatggagaatacacctaccacttacttcgataaacagaagtagagtctatggtttctttctttttttttttttttttagctgctaaagattattattaggacagaaggacaattagctttaaaagcattgctcagaacatgtatttttttttctagtattcttttttttttattatactttaagttctagggtacatgtgcacaacatgcaggtttgttacatatgtatgcatgtgccatgctggtgtgctgcactcattaactcgtcatttagcattaggtatatctcctaatgctatccctccccactcccccgaccccacaacaggccctggtgtgtgatgttccccttcctgtgtccatgtcttctcattgttcaattcccacctatgagtgagaacatgcggtgtttggtttttttgtccttgtgatagtttgctgagaatgatggtttccagcttcatccatgtccctacaaaggacatgaactcatcatattttatggctgcatagtagtccatggtgtatatgtgccacattttcttaatccagtctatcattgttggacatttgggttggttccaagtctttgctattgtaaatagtgccacagtaaacacacgtgtgcatgtgtctttatagcagcatgatttatagtcctttgggtatatacccagtaatgggatggctggatcaaatggtatttctagttctagatccctgaggaatcgccacactgacttccacaatggttgaactagtttacagtcccactagcaatgtaaaagtgttcctatttctccacatcctctccagcacctgttgtttcctgactttttaatgatcgccattctaactggtgtgtgatggtatctcattgtggttttaatttgcatttctctgatggccagtgatgatgcgcatgttttcatgtgtctgttggctgcataaatgtcttcttttgagaagtgtctgttcatatccttcgcccacttgttgatggggttgtttttttcttgtaaatttgttagagttctttgtagattctggatattagccctttgtcagatgagtagattgcaaaaattttctcacattctgtaggttgcctgttcactctgatggtagtttcttttgctgtgcagaagctctttagtttaattagatcccatttatcaattttggcttttgttgccattgcatttggtgttttagacatgaagtccttgtccatgcctgtgtcctgaatattattgccaaggttttctatgctatagaaatagcatatttctatgctattcatcattaataacaattatttaataatattaatattaaatagttaatattaaatttttagaatattaaaatttaaaatttttttaaaaataaatattttatattaaattatcaaataaatattaataataattatttaatattataaaattaataatctttcattattgaattattgattgagttaagtaattaattgattaactgataaggattattgttaaattattgtactcttgggtagtacagagactgcatactgcgctttgccatgtaaatactattgtctacttcctggtacgtggctctagggaggctatggcagagtcaagtgcttttgcccttaatgtgaacaaaaaatagtgattgctcttagtagccataatatttggtttattgtctgtgttggtaataatttctgctgtgttttcatacagtgaagtgatgtttctgctgtttattttagttgcattggaatttgttatatttatttctttgttttccttttgataagagaagtacgcacttagttatttataaagatgtttggacttcacatgtgagtacagtggtgacatgctgggttttcctggtcattgcttagctgtatttataaagtgaatattactgagcagttaagccttaacatcgagaatcacccattttcatttttgaaaactggaaaggattaggtagaatgcaaggagaataaattgaacttaaatgtttgtgttcaattgaggtgagctttttcataagaatattcaagcctaggtcaacatgcagcttgttttccctctcaccacctggaattcagtctctatcggtcaatgtcttctaaaagggaaatgggttcttaactatatacttttagtactttattgcttatcttccctttcttggttgaataggctgtgttagatatttagcttcctgcccctttctttatgagacagctagagcagtgcttttcaaaaccttactaatgtgtggatcacctgggggatcttactgaagtgcagatcctggttcagtgggtctgggtctgctcaggcttgaggtgaggtccacgctgctagtcctgtgacccagcattaggtccccaggatacaaaatatgaccggggatctctgtcgtattcgggggtggagatgagacagcgtcccaatgatgttagtcacatggaacatttagagatgcggagctactttgtcagtgttttacacatcgtcaagctgttagtcaagacagtaatcctctgtggaaactgtggcttgaacactttcagtaaattgctcatggtcatagtgcttggaaatagtaaattttttttttttttctttgagacagagtttcgctctgttgcccaggctggagtgcagtggcacgatcttggctcactgcaacatctgtctcccaggctcaagcaattcttgtgcctcagcctcttgagtagctgggattacaggtgcatgccaccacacctggctaatttttattttttgtagagacagagtttcaccgtgttgtccaggctggtctcaaactcctgacctcaagtgatccgccgaccttggcctcccaaggaactgggattacagatgtgagccactgcatcctgccagaaatggtgaattttgaatttgaattcagctcttcctcaattcatagcccacattctttctagcatctacttccaaagatagcctagagagtattttttatcttctatagctgtaaaccttgatatgggcattctctgatggcctgtgtgttttgaaaagattaatggataaggcagtggatttcactgctaaccttgctacaccgtagctgtgtaaccttgggtaaggcagtttctttatctgtaaaagaatggaaagatcacctaaataaagtactcagtaaacactcaataaatattaaatatcgttattattcaacaagcatttttgacgctgatcactagccttcattaaaagtataacttggatgaacgttgaacacaccgagtgaaaggagccagacacaaaaagcacatgttgtataattcctttcagacagtatatccagaataggtaaatccatagaatagaaaactaattagaagttaccagggatggaggggagagagggatggggagtgattacttaacaggtacaggatgtttttctggggtgatgaaagcattttgaaactagaaagaggagctggttgcacagcatcatgatataaaatgccattgaattgcacactttaaaatggttaattgtatattatgccaatttcacctcacttaaaaaaagtcatatatggaaaatagctttaaggcaccactacaactactaaataggtttgtatttttaaaagaactttatggaattataggaagcatttcttgatgttatgagatgtgttggaaatacagaagaatagcttattttggaacagatattattggcttgaaattttgccagttcaagctggtctctttggaagactagacctttattttctggcttgaaaatgctttggacataagtaccctattattttgttgttaaaaattatactattgacatccccaattttttctcctgaagttcagtataacctagaaataacttcattgctacactatttcattaactacatgggtgcttttttagttaataatgatgcataatgtcttcatgtggcagaaacactaacctgccccttgtcataaatctgtaaaaagatggacattggtttaaacccagttgttgaattctgtgcttttaaccagtatgttacactgtctagttggggaagaatcccaaatcttcttctttctttagaaaaatccaaaacagcatacaaactagcaaactctcataaatgttgtttgagaaaatcaattgccctaactactaagacaaaggatctataaaatctgatgagaacaatctttgtaatttgatttttataattttgtcagcttaaattagtaaaaagttaataattattacttttgttacgcttataataaataatgtgtttctacaccttccataaacacctacaaccacactttttaccacagttggtggagtgaagggtggatggaggagatagtggcaaaaacaccccaatcactttcagtgattaaagtaaagatgtgtctaactttactcctaaagtatcatccagtaaagcggaatgtaaaacatacttttgaactgtttgaaatcaactacattcctatggcttacgactgtgggacaagtttctaactatcagatttgatttttaattaatcagtgatattttataccagcagtctccaacctttttggcaccaaggaccagttttgtgaaagacaatttttccagggacttgggggttgggagggtgagggaggaatggttttgggatgattcaagcacattacacttattgtacactttatttctattattattacattgtaatatataatgaagtaattatacaactcactgtaatgtaaaatcagtgggagccctgagcttgttttctgcaactagacagtcccatcggggggtgacgagagacagtgacagatcatcaggcgttagattctcataaggagcatgcaacctagatccctcatctgcacagttcacaatagggttcgcaattctatgagaatgtaatgccactgctgatctgacaggaggtggagctcaggtggtaattaaagcaatgggaagtggctgtaaatacagatgaggcttccttcactggttcacccaccactcacctcctgctgtgtggccccgttcctaataggccacagactggtaccaggacccctgttttacacgatgtggagtcttttgtatgcaaagaatattgttgactttcgccacacggaagcccccccgccccccttcccccgcctttttcctttccagttacattcccacaggtattcttagtaccacaactgcagttgaatttcacagtatggtgggtggtaagctatggtgggcggtatgcttggataaggctggctatttagaaatttggaataaatgtagtgttatgactaacagtaatgttgcctatcaaaaattgtgaatgttaataaatgttttcaacacaatcgttaatgctttccagtgagttaaaccagcttcatgttacagttgtattttccatcccagtagggagtcattattaaatggggtcatgttttcaagcccaacttaaaatccctcttacagattgccttccccaccccacccccagttttctctcatcacttatacattgaaataattgcttattgttttccctctttaaattttttttgagaagtcaaaaattgagtaccttgttcagtgtttttgcttatgaaatactttgtgaataaattttgttcttagctgaagaaaatttcttaggcagttaagaaaatactaataagctaattaatgaataaaaactaatttcattggtcctgattggaagtgcaacatttaccgatatttagctataatccttttgatcagtcagaaatttgtaattattctttgagaaataaaaagttgagagggctgggtgcggtggctcacacctataatcccaacacgttgagaggccgaagcaggtggatcacttgaggtcatgagttcgtgaccagcctgaccaacactgtgaaaccccattctctaccaaaaaaaaacaaaaaaaaagaaaaaagaaaaaaattaaccaggcattgtgatgtgcgcctgtagtctcagctacacaggaggctgagtcaggagaatcacttgaacctgggagacgatgctgcagtgagccaagattacaccactgtactccagcctgggcgacagaggaagactgtctaaaaaaaatagaaaaggaagttgaaaacagcttagggaagagctgcaaccactgaccagcaccagtactccatcataatatatgcttttcacttataaggaactgtaatgtaaactgtggactttgggtgataatgatgtgtgaacacgggatgactgggtacaacacatgtagcactccagtgggagacatcgaaatgcatatgtggcggcaggaggtgtatgggagctctctgtaccttcctcttaattttgctatgaagctaaagtggctttaaaaatacaaatacagaaaaaaacttgtgctttctatagattaatttgaacatagacacattaatataatagatacattgatttgaacataggtacattaagttgaacacttaaggtttttatgatgtcctataccacaataaactgaagaagtctgccttacaagtttgttcaaagaactctcaatgctctcactgctccttccctgccttgaacaggaagtgtcatccagtgcaataagggggaaaataaaatgtgcatagcaatcagaaaggaagaaataaagcagtttctattcacagatgcagttcctatttaaattcatcagcaaggttttggttttatgaatgataatattaaaatgtaaaaaacactattttcattatgtaatgtgtcacctacaagatgctgaattcctgttgcagcggatgctgaattcactctgcccttcttataagaaatatgttgggccaaccttttgtttttaagtttgcttacagccttacctgtgctctttcaaagtagattttcactattttgaacactctattaaggtaaagatgtgttcggccaatgaaactactagagcaaaatgtttacactgtatttctgatttgattgttttaatacaactgaattagtgttttctcctatctctatgcaatattaattcctgggatgtctgtgtaaattaattaatttactgaccagaactctactttagcttcttatggttttgttttcttaacatttagaaacggctaaatttagaggacataaattttctccatgagattgtttaaattcagttgactttttaatgtggattatatttgaacttgaatgccgcacgcatttttaaggctggttcatggcttctgtcactggtacgttgtatttctcactgtactattcttttacgttgcctcttgtctgaaatgaacttgattttaaccttttattttctggtctaattatatgagcttgtggggagcctcacatattgttagtatatctccttaaataacatgcattgaggctgaggtcagcagatcacttcaggccagaagttcgagaccagcctggccaacacggtgaaacccgatctctactacaaatacaaaaaaaattagccaggtgtggtggtgggcgcctgtggtcccagctactcaagaggctgaggcaggagaattgcttgaacctgggaggtggaggttgcagtgagctgagattgcaccactgcactccagcctggatgacagagtgagagtttgtctcaaaaaataaataaattaaataaataaataaataaataaataaataaataaaataaacatgaattgtataatccagctttgttattttagctctaaacttctggtgtatggagacagattttcagggagtttggtcctggaggagagacggctgcagaacctcaaatattactgaattaaaaaggaaaagattgtattgatcattttaccgtgtggggattcaaatactaagaggataatgatgatgataatgatgacgatgaaagcttgtttatgggacattttactcttccaaagtctgggaaggaatttcaagtgtattctggggacttctgaaaatattagccaatgttagaaacaaagtcacaagccaaagggattgcttttgaatttaggcttgtgatccatcttcttttaattcactgttttaattaataaaagtctggaatatttacagaggattgtttataaaacttcacaaattagaaacttggaattaaaaatatatatataaaatatttcatatgtgtaaaaacaggataatatttaaatatctgacctcatgagaataatgactcagatttcttgttatcgtgagactttttctcaatcaactttttattaatattcataacatttatgcaacatgaagattctgaagggactttgttgtctgagaacacatctatttcagatctgcggagtgtatcactttttgctgtgtcttcaaagtgattcttggtttattgcctgctaaggctaataaatgtataataaatctgcttgttgtgtcacttgcaggtgctatggtctttagaattgggtcactggatttctgaggagccgttcgaactgtctcaccacttccctgcagctcccgtaagtcagatgttgttttacgatggtaaatgcagtttgctgttctcaagaaattattataaacataagggtggacttaagtttttatccagtcaagcacaattatgcccataattaaaaagacattcacagaacttaacaccttttatcaatttattcgcgagaacaaatgtgagaacgtgagaccattgtgcaaaaagtagtgaggaatgcagtccaaagaaaatttgacgattaacatcctcagaactgagaaaaacaaaaatgaaaaaagactgaattcttgggcaggtagtcttatatcttgcttaatgtttttactgttaatagaaatagaactgataggtataaagattatggcttgctggtgctgtgataacagtatttatatttttatggctttcctaaattccacttcaactttcaaatgcttcattgaaaagttctgggttctaattttttttaagattaagtaataattaagtggataatttaaagtttgcttggatacaggattgtgcagaagttgcctttcatgttcaaaaatgttaatttgtttgtcacagtttattcattcaaaagattaatagctgaaagataaatggtgatttttatctgccactggtgttgttatttagctgtttgagtaggccatatgactaaaacataacaaggagttgaactgtgctccctgatcactgtagttatctaggttgttgggttgttttgttttcatttttaagattactgtttgatttcctttcagctttataaacattttcttaaggagagacaaaagctcctctcagcaaaactgtttgtttgaaataccgtgtaaggaattgaagtgtaaagtaaaaacacaaattccccccattctcgctcataagagattatatatgatgcacaatgacataatgagatttgtccttgaattttttatcacctgcctacaaagagaattgatataaattgtgttgttgccagtttttcctgcattagcgtttccctacctaagtatccatcactcttgtcattgagatatcctagaaacttgttgttgtctttcgaggctgtgaaattttcttattttcagttgtttttcaacttgatacaaggccatgataccgttgttgaattcataaaaccttcttaaatataaagtagatacagttctaagatagggaggttcttaactagttaaatagttgttggaaaagtgcaccttggtggaaataaaacagagccttgactttgccagagtccatcattgactccaaatatgtagcaacacctgtgtgttctaaaactacgtcaagtggtggggagaagttggggtaaaataaattagattttgaaatggaataaagaaaaaataatggtagaacactgtaaggtgaagacagacatatagtagatgctagttacagactggactctgaacttccttgcaaatgattcagaaaagaatatatgagaaattgcctttaaattataaagctttacacaaatgttcattagtattaattgtactatgaaaatttcaaaaggagttaaaactccaggagtttatggttttgtagtcccgagtataaagctgtgttctcaaattttcttttctttctttttttttttttttttttgagatggagtcttgctctgttgccccggctggagtgcagtggtgcgatcttggctcactgcaacctctacctccctggtgcaagcaattctccctgcctcagcctcccgagtagctgggattacaggtgcccgccagcacgcctggctaatttttgtattatttagtagagacagggtttcaccatgttgtccaggctggtcttgaactcctgacctcaggtgatctgcccaccttgcctaccaatgtactgggattataggtgtgagccactgcgcccagccctgtgttctcaaatttttggtaaatatttaaatatattatgaacatcagattttgtttttgcactttgaaacccttttttttttttcagtttgctgattgacataaaaaaacttactagtgtcaattatttttttccttaagtaaatttaagggtgaatcttgagacatatagctttgtaaatttcttaaatagaaggcttttctcaaccagaaattaaattgtagtctagttctataaaaatatatcttactaggaaagaaaacagacctctgttttagaatagtgagaagatagtaaagtttctttgtcatagaatgaaatgtataattttcctcatcattaaaagtaagaagtttccttatcacaaggcacaattaggtcttttggaaacaaattataaaattgtaaatattatcataaaagttaaacataggcatatcccctaataagttatatttaattactaaaaataccttcatatttaacaatcaggcagaaaaaaatagtacggtctgcatataaactaaaatggcacgtttctgttgataatttcagagattctggaagtttctaccatataaatttgaaatacgtatttgagcattaacttataactaagctgtcaacataaatgtaaatacgctgtttttgaaataaaaatttaaagcacctaagagatggagtaaaaatgcactaactgtttttccaaatattaaacttctagtaaccccttctcagaatatccctgaatatgtctttttatggcttagagagtttttttcttccttttaattgtgatagtgatggtgaattcaggacatatgggtatttacacagtgtataaacagtgctcagaagaatgcagttccaagatgatctgtattgtataacataagtgttctgttttccagttatttactgataaacttgcacataacattcttggttgtgacagcagcgtctgtaaactgtcagtctgattctcagcctcgggttcatctttgcataggtgttctgtctaatcacaattatggatgtttagggtcttgctttggtccgttaagtgatgcaagtttaagtgataaagtttacaggctctaatctggagcatgtgggtcccgtcagcaccgagcacacgccctctgtggtggaagaggacacagtgcgcagccgtgactttcagtgcactgggcttaagtctttgaaaatagttcgagacagttcctcaggtggactgggatgtttagaaatctgctggtcggatcatcatggttgtggccttgagcgaatagcctgagcctttccagtagtaccatttaatgccgttgaacttatttgtgttctgcctctgtggatagtacattccgttcaagttggaaggaccacatgcatcaaaccaccagcctgtgaaagtaaaacacagaaggaattaggaactaggtgatgccagctcccaccacgaagacagcaatactcagctaaggcaggaggcacactgcaggcgtgtggagtaggcacatgcagatgatggtgagtataggatgtgcactggcagagggattgttttccagccatacacccatgacatcacagttccattacggcaaatgcttttacaagccttcttccaccttttcccttgtgctgtgtggagaggcctgaattctccacagtcctatttggtaagcccacagtgtgtacacacttacagcaggagtaagcaaacatctgaggcacagttggaaaactctccttcaaccaggattactttgcagtcccagcaacatggtgggctggactcgctcaggctccccttgctctattaaatgattttttcggttgaagtttaaactaaaatattaagtactcagtggagctacataaaaaggaagtctctatgtttcagagacaaaaaggaaatttaaagtgagagtgtgtgctcgctcagctaaagccagggcaggagaggtgtccagcacaggggctgtgggagtgaagccccatctgcaccttaatttctgggcttggccaaaaacaggagcatgctggggtttgtgagagaaagaaacacagtagtccccccttatctgctatttttgctttctgcactttcagatacctgaagtcagctgggccaaaaatattaaatggaaaaatctagaaatattctataagcaggggccgggcgcagtggctcacgcctgtaatcccagcactttgggaggccgaggtgggtggatcacgagatcaggagaccgagaccatcctggctaacacggtgaaaccccgtctctactaaaaatacaaaaaattagccgggcgtggtggcggacgcctgtagtcccagctactcgggaggctgaggcaggagaatggcgtgaacccgggaggcggagcttgcagtgagccgagatcgcgccactgcactccagcctgggcgacagagtgagactccagctcaaaaaaaaaaaaaaaaaaaagaatgtataaaccttaaattgcatgccgttctgagtaacgggataaaatctcctgatgcccacttcatccctcccagaacatgaataatctcctctatccagtggatccacgctgtctacatccggtctcctgatcacttagtagctgtcttggttattagatcgattgtcacagtatcgcagtgcttatgttcaagtaacgcttatttgacttaataatggccccaaaagtgcaagagtgatgatgctggcaattcagatatgtcaaagagaagctgtaaagtgcttcctttaagtgaaaaggtgaaagttcctgacttaataaggagagaaaaaaatcgtacactaaggatgctaagatctatagaagaacaaatcttatatccatgaaattggaagcaatatgttgtatattattcagttttattattgttaagtctcttgtgactagtttacaaactaaactttgtaagtatgtgtgaacaggaaaaaatatacacatagggtttgatactgtgtgtgatttcaggcatttgctggacatcttggaatgtttcccctaaggataagggaggactgctgtaaccttgattttacatatgttaaactgaataaatctcaacaacactgtgttggaggaacacatacagtatgatactccttatattaatttttaaaatagagaaaataattatgattgatatctccatatgtaggaaaattaataaataaagtgaattaacctcgacccaagcgtcaggtagggaatggcactggcaggtcctctttagccttacccgtaatgcattatttcttaataaaaactctatgccaaagaatatatatatatatattcttatgtatatatagaatatatatatatattcttatgtatatatagaatatatattctttatatatgttttatatatatgtatacatatatatgttatatacatatatatgtatataacatatatatgttatatacatatagaaagaatatatatattctttctatatgtatatagaatatatatattctttctatatgtatatagaatatatatattctttatatacataaagaatatatatattctttatatacatatagaatatatatattctttacatatatagaatatatatattctttatatatgtatatatagaatatatattctttatatatgtatatatagaatatatatactttatatatgtatatatagaatgtatattctttttgtatatatggaatatatatattctttatatatttatatatgaatgtatatattctttatatctatttatatatagaatatatatactttacatatatagaatatatgtattctttattacgtatatatattctatatatattctatatatattctttatatatacgtatatatagaatatatatattctttatatatgtatatataaaaacatgcatattctttatatatgtatatataaaaacatgcatattctttatatatgtatatataaaaacatacatattctttatatatgtatatataaaaacatacatattctttatatatgtatatataaaaacatacatattctttatatatgtatatataaaaacatacatattctttgtatatataaaaacatatacatattctttatatatgtatatatataaaaacatatatatattctttatatatatatatgttgtgtttatacattggtttgttatttcatccaggttcctacattgtttcttggtggtaacagctcagtgacttcatttgattcaggtgaatgcagattggacggaagtttgcgtgttctattcagaatccttcacatattcaggactttgacagattcataggtcagtgccttctggagcttgtccaactagagaagttgctgtccatgcaaaatggagctgctcattaggctggttcattcatggtccagaccactggctggaatttgacctcttcacaggcaagaccactccactttctctcttgggctgtttttcctctccccagtctcttttccaattacattctcagtccctaaatcttgatttgcctaagtaaatatattgtttccttggttattaatgcaattctcctactctcctgagaagctcagcacatacgggtggtctaataagcacacccttctcaaggagagagctgggtccagcatgtggggaaatggtagacaggaaacaaagtcctaggtgtctgtggctcctccacctgaccctttccctgctgttcagctttaaaaaggatgattgtgccaggatgaaggaaacaggaagcttttgcaaaatcaataggagggctttgctcattggtgtaataatggtgtaacatagggaggacctgtggtaccaaatagtagtcatattatctcaggaaccagaggattgctttttttttttttttaatgaggcctgattctttcagcataaaaggcatgaaatttaaagacatgaaaattactgaatttcatattattttcattactaaatcctccttttgactgttaatgatgctttttttttttgagacggagtctcactcttgtcgtccaggctggattgtactggtgcgatctcggctcattgcaaactctgtctccccggttcaagagattttcctgcctcagcctcctgagtagctgggattacaggcgtatgccaccacgcctggctaatttttgtatttttagtagagatggggttttgccatgttggccaggctggtctcaaactcctgacctcaggtgatccatccaccttggcctcccaaagtgctgggattacaagcgggggccaccatgcccagccctattaatgattcctatagtgtaaatgcatcataacttgggtcatccatttgtttaatgtagtaactttcatttataaaacatgttgaccatagctgttacctttggttttcctgggtgggtaacatattaatttttgcagatatgatttatgttctctagaaattaaaccctgccaattttcctgttattctttacattcattttgcactattggcagagtttttgttgctactttaaatctttcagtgtttttcaagaactaacttgacagcatttgtcacacttttttcttgtctcagtcactaagtagcgtttgttcctgtcagtgaatttctaaacttttaacaaatcagaaaaataacactttcttttctttttttttttttttttttttttgagtgaattcttgctctgtcccccaggctggagtgcagtggcacgatcttgggttactgcaacctctgcctcccaggttcaagccattctcctgcctgagcctcctgagtaggagtagctgggattacaggtgccagccaccatgcccaggtaatttttgtatttttagtagagatggggtttcaacatgttggccaggctggtcttgaactcctaacttcaggtgatccgccctccttggcctcccaaagtgctggcattacaggcgtgagccaccgggcccggccagaaaaataacattttctaaaactttattcctatgtttgaactctcaaatgtttctgaataccaacccatctgttttaagtgactactacaatggtttttggcttatgagtgtggttttcattgtctgttttatggcagtgtaataccaaacctacaatacaagaaaggtctcaaagtagaagatgactcattttaatttgatttactaaaaaaggtggattaactcatttgtgtttataggtgttgctatatattaatggaatcttttttaaaaagacagctggggccgggtgtggtggctcacacctgtaatctcaacacttctggaggctgcggcgggcagatcacttgaggtcagcagttcgagaccagcctggcaaacatggtgaaaccctccctctactaaaaatacaaaattagccgggtgcactggtgggcgcctataatcccagcactggggaggctgaggcaggagaatcgcttgagcctgggaggcaggggttgcagtgagctgcgatcacactcccttctggacaacaaagtaagactctgtctcaaaataaataaataaacaactggagactgtgtctgtaaataaataaataataaatgacagctggaaattccttctttgaacattaaattattagttggaaatatttctataatctatattactgttgtggttgctacttggaatttttaactttttacataaagcaaaatgtaattaaaccatctctctagtatccagcaagcacaaacgcaggagagcttgctaagaatcaaatatcccctctccttgccagggctaggtcctgaggagacacagttggcttgctgacaagtctagctccatatcatattctcacttaaaacttagtctaaaaaaagtgaaaaacacatttacctatatcaagctagtgtgtctacgtatgaaattgtggacatcgttacaaatcacaatttgtagtccaaattgccagcctttccctctatgaaatcattccttgccaatacaaataggaagacagaaagtcatccctacctcctgttagcatttgtgaacatttgcaaatacatttgtcgttgtctccatcctttgtgctaaaatcatttcctggttggctgatgctgcttattttgccggctgtccctgtaagtcctttaaggtgaatcctgtaagcgtgcaaagaaaaaaaacacattggctagggtcattgatttaccgtagtggcaaattttttgtgatgaagaattccattctacagaagcgtgttctgtactcgttaatggactaatgcatactctggacaaaatattttgcactggtataaacaggaaccaacttatcatcaaatccttcagcaaagagggatgttttcatgaaaccttcaacacatatcacttgcacaactatcagaagcgactgtagagccctgtaatttattttcctgctgctttcagataaacagaagagaaagaaatgcagcaccaggctcctcctcccaggtctccagtcatcttccatagagacggagtcctgagacaactggacaacctcaaacattattttccgcagggggccccgggggggatggagaatgcagcagacaaggaatggccactgagtttggggaagaaatctacagaacggtgctgaaaataaatccttgtggctacatttcctcatgtctgtatagtagggtaatgtaattaaacttttagacattgagaaaggaacaaatgtcggagtaagttagacactatttacaatacagacgatccctgacttcccatggggctatgttctgataagcccattttctgttgaaaatgttgtatattgaaaatgcatggaatacacctgacctttggagcatcatagcttagctctagccttccttaaatgtgctcggaacactcacattagcccacagtcagacagagccatttggcaacacggtgcacgcagtgtctgttgttcaccctggggatcacaggactgactgggacctgtggctcgctgccgctgcctggcatcatgagggagcatcgtgccacatatcactagccagggaaagatccaaatttaaatcccaaagtgtagtttctgctgaatgcgtatcaccttcacaccatcgtaaagtcgaaaaatcttaagttgaaccattgtaagctgaattgcaaaaatacggcttacatcggtcatctgtgtaccagcaaggagcatataagggaagggagaagacaatatttttgaggttgttttttctttttttttttttattttccataactatgctcaagagtttctgctgcaaagaagcttcttggcagatggttcaggacagatcagagcaggcattcacgtaatggggtatgccatgttggcacgttgggtcctcacgtcctgatggagaaacaggcacacgaagacccaggcgaggagcctacaaagcaaatcctgcaatggtggcaggagaagtgtacttgaagcaccaagatgatgcccttctttgtaaaacctgctaatgtttgcaagctgccacattggaataatataatttctaacagtttgtattggaagaatacaaagaagagagaaaatgttcttttagttttacctgctggtcgggccaggccaggtgcttacacctgcatgcacactggatgcttataaccacctgcagtggtggccgccatctttgttttggcactgaaagtcactgaggttcagagatataaacttgtccgaggtcagactcttaagtcatggaggtaggatttgcaccagatgcagcaaatgcctctgccgtgtttcaacactggtgcacacctaaacagagatgtttgtttgttgaagaagttgtgaaaagatgagggtagggccatgtgatgtggagttctgtaagtgttgctcctaagtgacttcagtattaaggcagccctagaaacttcatcctaaggcatgaactggacatgtgagtctcagtattttcccacatgtttcaaaagtgagactggccgtagctcagtctctaaatgcctgctgcaaaatgctaatgtcataaatactcatctctgttgggattttgaaacactgtactttctttccattgtcttcccattaatcatagacaggattgagatgaaccacttcccttgcttatcttttaactctctcttgtctcctttgaacatgtttagttctcatggaacttgttaaattatccccagaggcaagaaaaataagggagaatactattttttatgagtctctgttagaaaggttttgtgtaattttaggtccttttgtggcccactggtttaaagtgctttctttaaaatttggttattaagaatggccacgttcttgaagttgctttacattggtatgggttgatttttttttttcaatctctgcagctttgccagggatgattttatataacagtggagtaaagaggtaacatcaacattaacaattaaacctcagtgttatataaaactgccagaatgtgtgtgaaaagtgatgaatttttaagatttaatgtacgcatagcttttagtttcactagaaagaatgaaattctattgatgcatttatgcatttcttataacatgtattttccagttttccaacacttggggaacatttcttctgggaaaaaaaaatcccttacatgctgcatacaactggcgtctcaaagcatttgcagttatgagaagtttcagtcccttcacagttctcttatcatgctagcatcatgttttattaggataataattttcgatgtaatatctattttatcttgccaagcaaattaagctttaaaccaatgtgtgtgtttttctaaatggcctatccaaaaattgattgcatttctaaaggaaatatctgttaagaaccatctcagtttaaaatatttttataatgtcagcgtacaagggtaatgacccattttgtaaaaatctttttatacaaacagcctaatccttaatttttgtgcttcttttttttttttttttaattcttctgttgtagattcctaactgttgccagttgaaaaaatatttaacttggaggtaaaacactgaccaaccacttgtgtctcaaaattcattgaagttttgatctctttggagtcaagttggaactgctgtgaggcccaaacacctatcttctcattcatctcggttgttgcctctccaggagagcctgatctttccataatgagaatagtgaatatgcttcactgatgtttaaagagtcacatccatgtatatctgtttctcaaacatgcttctgaattttcatccactgtttgtacagcaggacatactgggcattgtagagttttcagttggttgttcaggcaacttgacatttagccgcttctccgtgctgcccaccacaatcctcccctgggcagcctgctcaaggactttaacattgtgtctcctttcagactgttcaggtcgtggagcggagtgtctgacttgggcattaatgagatgaagacgagactgtaggtcagatgatgactgtttttgtgatgttcgtgttgaccttcatttgctaatttctgacctcaaagtgggtatttcataatgtgtgctccatgatcacgaggcgccaccagtctgtgctctttagactcctttaggctggcgttggtgccagtgggcacacagtctcacttctctgcccctcccgttgcacacacatttcggagtgcctctatgtgccttgtgtaccagcattactgtgcatgtggcttcaccgtacttatcttgcacactaggttgtcaagtcccattgctgttctctctctctactctcatggcattttagaggcagaaagtaaattcccagtcaaggttgcccatgctattacttatgattattgctaccaaatgggtgaggacaaggtaaacacccagggaatgctgtgaatctgatgtatttcctgtagaggagagcagagttgactaaccatcccacctaactctgccatctctaaacttgacaactaatcttgactttgagattgaagacaattgaatgtgtttaaacttcataaagacagactaacttttgaaaccttttggaataaaacagcacagtcacaagtatccatcatttatgctattcatgtgacatattatcatgggaacacttactattcactgattttacaaatacctatgaaagccaattatctaccaggcagagttcttctaggctttgaagatacacagtaaacacaatggacaaaatactgtttgtatgaagtttcttttatattgttataaccaaagttagaattttaaacccagagaaacttaaagaagtaatagtttagatcttggttaaatcattgtgtttctcattttctggaatagtcacccagcaaaccttttaattttttttttctttttctttttctttttttttttttttgagacggagtcttgctctgtcgcccaggttgcagtgccgtggcacgatctcggctcactgcaagctccgcctcccgggttcacgccattcttctgcctcagcctcccgagtagctgggactacaggcgcccaccaccacacctggctaatttttttgtacttctagtagagacagggtttcactttgtttgccaggatggtctcaatctcctgacctcgtgatctgcccacctcggcctcccaaagtgctgggattacaggcgtgagccaccgtgcccggccacaaatcttttaattttttctttcaattaccatgaactcacttacctataattgagttcttcacttgagagatagaaatgttcatacaatgagtaagcctcattcccttcccagtctttaaggtgtattttaagcacatagcgttgctgattagtcagttgcgaaacaaactcatttcccagccaatattctcctgaagggttaccaaatccctgtaatgcaagttgttaaattcaattatttcatgtaattttttctttgtatatttgaagtggatagtccgtcaacttaacatagaataactatcaaatagcagaaattccttctggtgctgtgacaatttagggtccttcccaaaggaaaatggattttaaataggtcagttattagacactaagctgctgctggaagaaaacttgtattaggataatgagaactacttggggagccaccagcagaagccttggcataaacagctcagttcatgggaatgtgaagcaccattaaacagtcggcttaccaaaaaaatgctgagtccacctttaaaaataagctaagtagtggcagccttgtttatttgagagtcttactctgttgcccaggctggagtgcagtggtgtgatcttggctgactgcaccctctgcctcccaggttcaagcgattctcctgcctcagcctcctgagtagctgggattacaggtgtgcaccaccacacctggctaatatttgtatttttagtagatacagagttttgttatgttggccaactggtctcaaactcctgacctcaggtaatccatctgcctcggcctcccaaagtgctgggattacaggcgtgagccagcacgtctggctgcagcttttgttttgatacagtttaccttatattggccattctttaaaggggagactgaagcaccaattttaaaaaccatgtcaaaagtcattggttagtttgggattggtggttaaggttccgcagatcttgaaagctatttttcacaagggaaattcttttctgatgccttaaagaatgtccttaccactttatattctttccaagtcctctgaaaatcaacgctgccatcctcacgtcgctgaataattgtccacccgcctcctccagcttccatgtcacagtaggcctgcaaacaggaatgcagggtataagtgacagagcccccccactccccccttacgtagcagaagcaggaggaatgtagaccctgagtgcaggactcagccgagagggttctctgggatataaggcacggagtagaccatcggggttgtctaagaaacagatggtttcaaataaattgaaagtgatggattaaaatgatggtgaaacataaacagtaatataatataaagtgttgatgagaatatgactcacttgtcatcatctgttccaggctaaagaccccaccctgatggctggtccagagattgctgtttttttagagattcattatgaatggcacattttggcagattggccccgaaccccacatctccatcctgtagaaaaccattgacttgtgttcacagccttgaaacctttcactaaatgccagcccctgcccctccacagagagctatgtgaaggggatactctttgatcatagggtttggaggactcctgttacattctcgtactgtggggctgtttggcttcctttatgtgcaatactaatcagattttttggttcacatctgagcacaagggccttgaggctccagtgtcctggtgcaaggtgtgtgacctgggcttggcttagcaccttggcctcaagggcatgacttcacgcttctctgtacatagctcactgcccacagtttttctctaagcaactctttttatttctgctcttaaactggctctgtgggtttaaactttgtccagaacacagaattctttcttaagctaagcgcatgcatgctcaatttcaactcagctggagttttattatgaaattaaaaacccctgaaaataagattacataaatagttttaaataataaagattacagtagaacgaaacatgttttccagaaagtaagataaattttctgccacatacaaggtaggaaatattgaagttaaggttcaaaaccaattgtaaatattcttcttgtgttgtgtcccatggtctttttgagaataatggaggcgatttggcagggtaagcttcaacgcacactgttctctgtttacgagttagaatcctaaagaggagagcgaaaagagaaccaagagagtgctattcctgttctttcatttcctacatgaggaaagaggggtgcagaggaagtgcagtggctgcctgatgcctcattgccagtgcaaccagagaactgtccctggaacagcctggtctgcaggggacttctccccagcatggttctggtctctctccaggaaggtcacccagctcgtattgccttccccagtggcactcatgtttggaaacataggtgccattaatgaaagttacatttattaagaagaaaattatttcctcattttaaattaatctgatgtagaaaatcagtctgcacaagctaaccccttgttaccgctctgtattgctatgatttttattatcattgctacacaccactctcatccaagtactctgccagatactttgtgtatattatctataatctcacagcaactctgctgtagtatcataattctgcatttttgaaaggagaaaagatttagcaaagttcgattttgatcagttactcaccttctaagtgatatataggatttgaataaggtctctttgattcctgttatgttttttttccactgacatcatgctgccaaaaacagagaaacctgaccctttggtaaataggccaaaagtccctcaacacagttccaagtttaaatcagttcatgaataatactgcctcttatttgcctgcagtcaacaaaatggtcagtgctgctcacttctatcaatatttctttttaaaaatctatttcataaaccagctgaataagctactttggtttgaggattcatgtacatatattgaagttaattctgtatcctaaatggtatgctcttgggttgaaagcattgacgtggctcttggtgagcctatccttgttccaagaatgtttgattcttcagtgtcaaaattactgctatgaagttaccagtacttaaatacatgttctatcttgttcagagaacaagtttatcttgttatggaagtcagaggcaaaactcttaaatgtctgagagtcactgccagcacataaatgatttgagccatatgagtattcgctttgattccattagtgatgatgataaggttattagaacattttcttagtacttcatccaggtttttagaaaaaagaacagaggatttgtaaaaactggagtattatggttaattggactataaaacttgcagagaaagatagtgttcaaatagagttatctacccagccagaagatactgagtaaaagtgctgaaattgattatatcaggatcagcaaagcagaagtcctcagatacttcccaagaccttaccactccaattacaacaaacctaagggcagttaatatctttaatctgtccactggtgcatggtgcaggaacctgatatctttctataaagcttgatgtttttcagcaaataatacttgacttgcttcaactctgaggcaatgattaagtgacgggttaaatagcaaaccatagagacaaccgttaggagtcaggtgtcctgtgaaatttagggaaggaaatgaccatacatgcttttgataaatgccatcttgcagtctctctctcgtagaagaaccaaatgaatttttcaaaactaaagctgcagtattttggcctttcaggaaaagatgtgctcaaagaccaattgaacattcttttcttgaattagataaatgagtgcagaatcgggtctcctgccaggcagagaagttgtctggtagtctttgaaggcagtgaaaatggtgaccactaccatttactgtcccaagttctaccccaggggctgtccctgtgttgtcacaacccccaaggctgagggtatcattgttctgttacagatggggaaactgagctctcagaaaggttaaatgactcgcccagagccacaaatggcagagctagaatttacatccaagtctgtctatctctccctggatcagattgtgacttacagagtcttaagtctggaagggaatttagaagtaacaattgacaccacttatttttcaagatgagaaaattgaggtttgtgaaagcttattgttccctgctgtgtaaatgagtttcttttactgcaaatgtttaaagggaatataaatcctaatgtttccaaccatgacctgaggctcatataatcccagagtactatatattttcatctttctgcagaatatttcagttattctgggggccatggggtgggacagtgcactggggtgggaagcttgcacttagactgagaaacatagatgaaacaatgtgatggggctgcatggttagcggctgtccctctgcatcggtgtccatggcatccccatttcacatgcatcctctgtcccccctcttgacactcctgtccccaggccaagaacacgccaacatctggtgacagacaatggcatgcacagaattgtcatgaaaaccagatagcaaaagagattgaaaggcttagcctagagtctgttcgttgccttttcatctgcagcagactgtgttgtttgtgggtttgttcccttccttccctgttgtatggcttctagggcgttagggacattaactaattttcagggttgatttaacacagcattaatgaattagaaaggtttctttggaaagcattatgttgaatagcacaatatttatcttttccgttcataatcaagatacatgttactgtttcaagttccaggtctttaaaaccctaatgcttgtatttttaaagtgtttttctttgatactgttttaaatacttaggataatactcaatttaaagagataatacttccaagagcctcgaaaatttccactttggtacagtatccactgtattctctgtagttatttgtgttggttcaatatgtagctgcttttacatttatatgcaaacatatttatagacatttaatatatacagttatccagtagttacataacacttcaccacactgattctcctgtaatatcattcttccctatcaaatgtttaagagaagccacattgaaatattctccggaagggtttttttttttccttatctaaagttcagtgtctcccaaagcaccttcaggagtcaggctctctgagtgaggctgcagaactaggaatgactgaggtaagctgtgttgtggctttgcctgctgtgagtactgactgtccactcacgttacatgcagtaattggacatatgccttgaagtgaactccgctgctggagaagaaaatgaacactgtctttatggtgtgtttcgagtcttccagactgcgttagatgaggttagaatcgccttccccagcggttctcatggtgtggacctcagaatcctgcgtgtccctcagaccatgtcaccaagtccacaggttgaaactgttttcacgatgctaagacaccaccggtctgtggcactgtgttagcgtttgctcagatagagcaaaaaccatggtgggtaaaactgccaccatccccgtgtgaggcagggcagcggtagctaactgtacaagtcactatgcagtcacacacaaaaaagaaaggaacaataatatcactgaaaaatgactttgacacagcagtagaaattattaatttcatgacacctctatggctgatgcactatggttgttcaaccttcagtttttggaagatactttctttaaggaaatgagtctgacacctcaggaaaaacaactgacagtatgcattattcaagcaaaatgcaaggagaatgtatttcttgccgaagataagatagacatttctacatcattcatatgcagcttttgtattttctgcacagcagcggcacttagagcccttggcaagcactctaggcgaggtagctgcccagtaactatggctttgtactgtgtgaggctggggaagatctttggggagagacttctgctctctggttcctcactcactaaagtggcctgcctagagccagggagttagtaaggggagacgaatacctcaccttgatctcttctgtagaattagggaatgttaacgtgtagatgccattcgtggtgtgtcctgatttgaatacttcagcacagtctctgaagctgatttgttcttctttagcaacagtggggtccttagctgcttttaaaaaatagtaaggcatttaaacggagttcatgaaaagacaaagacttgttatttcaagagccaatcatttggtgagttttattactttggaattcttaagtaagcaaaaggctgtaccacttttttaacctttctagaaagtttcctttcagcctgttttcttcttaattctcaaaagattaatacttactttttggtcattaattccatgtaattaaaatacttcaaataatccaaacttcctttgctgatgatcaattacatgtaatgaaagtacttcacaatcacataaattaaattattacttttgaagatctttcatcttgagcagaatagggtaaacttagtatggaagaatttaaaaagaatgtccctaaacactgttatctgtatcatgaccccattgcctgccccttcaggccattatcccactgaggacatagtggggtgcagtgacacatctcagcttaccgcatcctcctcctcccaggtttaagtgattctcctacctcagcctcccaagcagctgggatttcaggtgcccaccaccaagcccagctaatttttgtatttttagtagagacaggatttcaccatgttggccacgctggtctccaactcctgtcctcaagtgatctgcctgcctcagcctcccaaagtgctgcaattagaggcgtgatccaccacacctggcccttccctccaatatataagagacgctgcaaagtgaaacaataataaggaaggcaaaatgtgcttaagaacctggcaagataagggaactagcatctcttaagtgccattgtattatctcatttaatcttaatggccatcccatgggtctgatattatttttcccatgtaaaacctaaataaatgaatatcggctgtggtttagtaatttgcccagtctcatccttctaattaatgatggaactaactaaaagtaggctctttactgccatgaatcaaaagtatgcttggggtgtttgcttcataataattagtataacatatatttccccttctcttcttccttcattttaattggtagatatttcatatgaaatatatgagaaatagcgccttttctgaaaggtgagaattttttagtcttttgagtgttttactgactaaaggttattaacgctgaagaaagcatgatatgtaaacttacagtttgatgtggacatcatagtcagtaagttattaactgtctccatgagatcatgttgctgcttctgaagaactgaattattcaccgtggcagtcactatttttttttctagttcttcaatgatggaattttgcttggatactaacacctgtagctgatctttctcttcttttattgactgtagttggatgatgtgcttgtcttccatagctagcaccttcttttctaggaaacttgtaaggaaaagaattgttagttagtgaaggctattctaatgaaatattttatatttattgaatttctacttctccaaggtactctgttaagatattgtagtggttataaagtaatatgatgttaccagagccctaaggaatctctgaaacttgctgagaagattagatatataaatgtgtgtatatatgtaaacgtataagcatatatgtatgtacatgcagacttatgcatacacacaagaaaaggtaccccatctggtccaggataggtgggatatgggtgttttttgtattagatgctgcagcgctcagaagaaaggtgctgctctttcaagcttagtgctcatgaagtgcttttttgagaagggagagtttcaactgggctggacccttgggtaggatattagctttctcctaaactatttatattttaatattaatcctaatgataataatagcacttaatgctatgtgagaaatactccttcatggggaggtgaatacttctcccagactcaagtactggcttaccagccctgcgacttggaacagtttacttagtcaccctatgcgttaatgtcctcacctgttaattaggatactatcacctaggtcatggggttggtgtgaggaacaaatgggttttaaaatgtaaatgctggccgggcgcagtggctcacgcttgtaatcccagcactttgggaggccgaggcgggcggatcacgaggtcgggagattgagagtatcctggctaacacggtgaaaccccgtctccactaaaaatacaaaaaattctccaggcgtggtggcgggcgcctgtagtcacagctactctggaggctgaggcaggagaatggcgtgatctcgggaggcggagcttgcagtgagctgagatcatgccactgcactccagcctgggcgacagagcgagactccgtctcaaaaaaaaagaaaaaaaaatgtaaacgcttagactagcgcctgtcatacattaacagtcaatgaatgtttgttaacgttaatatagacattattattcccatttccaatgaggaaattgaaacttagggacattgagggccaggctcagtggctcacacctataatcccagcactttggaaggctgaggcaggtgtatcactagagtccaggagcttgagagcaggctggccaacatggtgaaaccctctctctactaaaaatacaaaaattagccaagcgtgggggtacatgaatgtaatcccagctactcaggaggctgaggcaggagaactgcttgaacccgggaggtggaggttgcagtgagctgagattatgccattgcactccagcctgggcaacagagcgagacatcgtctcaaaaaaaaaaaagaaaagaaaagaaatgtaggaagaatgaatcacatacctaaagtcacacacagcaggtggcaggggcagaatacaatcccagaactttctgactctgaaatctgcttctctccttttaatgtggccccattccttctctaaaaaatctaaccagcgctatggcatgtacttaatacataacagttaatatgtgagccaagcccttgaaaagtttttttttttctttttttgagatggagtctcgctctgtcacccagactggagtgcaagggtgccatcttggctcactgcaaccttcacctcccaggttcaagctattctcctgcctcagtctcccgagtagctgggactacaggcgcatgtcaccatgtcaggctaactttttgtatttttagtagagatgggcttttaccgtgttagccagggtggtctcgatctcctgacctcgtgatccgcccgcccctgcctcccaaagtgctgggattacaggcatgagccaccacgcctggcagaaaagctttttaaaaattatttagagagctggtaaaattatgccatgtaagtcctaagatactttattaatggttatatagtttgccttcctaatttcaacttataaacatacattgctataaatatgttcaatgaagagcataccacttttaaactaaaaatagttcctgtccattaagccagaggaaacaaatccaagagagtagagactatgtatttgagaatgttaactgtttcccaggaacaaactcaaagacatgcacagtcaaggtatttggcagggttttttgttttttgttttgagatggagtctcggagtctcgcgctgtggcctgggctgttgtgcagtggcgcgatctcagctcgctgcaacctccgcctcccggattcaagcagttctcctgcctcagcctcctgagtagttaggattacaggtgtgccaccacgcccagctaattttttgtatttttagtagagacgtggtttcattatgttgtccaggctggtctcgaactcctgacttcctgattcgtccacctcggccttccaaagtgctggaattacaggcatgagccaccgtgcctggctggcatttttttttttttttaataagatacaagaggaaaattggatagcctgacactacattattcagcacctaaagaggctttctgtgataattgcaggaaaagcagcaactaaagatgtttcaatatcttcattttgtttgtacaaggccagtaaataaagctttcaaaatatagacacttttaaaaatagaaaaacagtgaccagatgtcagattcctctctctgacattttccttccaatataaagtttagtacacatgaatttgcacattgcagagttttgttttaaaggaaggggacctcatattcccttttttgagtcccgtataagtcagctgtcttatttaataatgaaatatgtcaatgatggcatctttatgtttcagaattattttctgtctactaacaagttaccacagcttctgttaatgtcacattagaagctggtgaaatattctatacatttcactagcttttctgcgaaggcatatgaagagcagagaaacattattttcccacctgcttgataaagaaaccttgaaccggccatttaacactgctgtgagttatctgaagcctcctgagtcactttgcacttactttcctaggaaccgaaagcatgtgaaattgacatacacgtttcactgagtgatagttgggttcagatcacgtcttaccttccgtttaacagagatgtattgaacacctaccatgtacgaggtgttttttagggttttggagaaaaatcaagaaatgaaagcatcatgaaccatagtcttaagcctgcggaaatttagatgttttgatggtcttcacatcatcaagctaaaaagacaaggctatgaatgtctcccttgaggaaaaactacccttgtggccatgtaaggtctgtaaatagaagttatcacagggaatacatatgaagatcatggtttcactgaagagaaaatggagaccctgagaagtcacctttggtgtcacgagcaccttcaggtgaaaggaagtagccttaggctgggaatcccacctctgcacatggcttcctgtgtcacaagggcagacaccctgctgtggacctcaggtgcatgtctgtctaggtgaatatctatctaaataaagctctatgtaaaatgaaggcattcgatttcatggcctctcgggccccttttagttcgaatgatctggtaaatccacctttttttgacagtaacattttctgactctttaaccctgcaaacaatattaaccagccaaggaactggctacccattacatatctcgcccataagcaataacaatcagtattaataataattattagatattcaattgtagctcttaaatgtattccagccccctgatcgttgtaaattagtatgtaattttggagagatgggggtctgtctttgttgcccaggttggtatcaaactcctaggttcaagcgatccacctgcctcagccatccaaataggagggattacaggtgtgtgccaccacatctggctaatttttgtattttttgtaaaaatgagttctcattatattgccctggctagtctcaaactcctggcctcaagaaatcctatcactctggcctcccaaagtgctgggattataggcatgagccactgtgcctggcttgaatctattctataaagaaagcaattgcacttttggggaattataaaagattatttaaaatgtggtttgtccaatgtgaaacaccatttgcatatttttgtaatgatatacttgcaaataaaatcataggccagtcagaattaaggtagaaaacacagcatgcagaactcatacacctgtaaaatcatcaacactattttctttttttattatttatagctgttgatgaaaaaaacctttttatttcctttcatatctgtgacaaaaaaatacgatttctacagctgatgagaaaaagcttattcttcctacaggcatagttgaaagccaatatgattggaaaaatatttgcaaagatgatatttggggaacataattgacccaaattggtagttttagcattgtagcatgctaaatttgaaacccaagtggggaaacagtattcagtattagggtatgttctacaaactggacatatcctaggtttgtcacggacatcattgtataacaggcaagagaaaagtaatctccagctcccatgtgttccaggaatcactgcagcattttgaagagaacattactaagtaagactattttaagaaaacgacgccaggtacggtggctcatgcctgtaatcccagcactttaggatgctgcggtgggcagaaggcttaaattcaggagtttgagaccagcctgggcaatatggcaaaaccttgcctctactaaaaaaaaaaaaaaaaaaaaaaaaaaaatcagctgggtgtgtgacacatgcctgtagtcccagctactcaggaggctgacatgggagaatcacctgagcccaggaggttgaggatgcagtaagctgagatggcaccactgcactccagccagggcaaccagagtgagaccctgtctcaaaaaaaaaacacagaaaagaaaatgaaattagcaggattgttatatctcaatgattggtctcaaatgttcatttactgtttgtagaggagaaatctgaaacatgaaagaaaaatatttgaattttaaaaatctatttgcttttcaaaaccctaaatcaataatgacttaaacttggtatccaaaggacagaaagaattatttcagcttagttcttgattaacagtaaagaacaattattgaacaagaagtttatcatttttggttaagaataaagaattatttaaattgtgaaataggatatattgttatagccatgttccatgttgtatatacatgtcttcattaaaaacaaggaaataggcacaccaggtatgtgcataaaattatcctcttttgtcccaagtggaacagacatatgaaaacagtccccacctatcccctacaattttttttctattgttgatcttgagatttttctatattttatttaaatattaatataatcatgtttaatatttttggttttactttatcgtgtgtttgaagaggaaacattggatcataaaatgtgcattggcttacagtataagtgtagctttcatactatagaccattctgcgttgagtgaagctaagtccccaagggcaaaggatcttggtcaagttaatactgaaataaaatgcctgggccagtggttctttcactccacagcactagctgtatttttataatagattagcatgtagaatactgaggcagggtttggaggattactctaagaggatcttttgggccagtggttctttcactccacagcactagctgtatttttataatagattagcatgcagaatactgaggcagggtttggaggattactctaagaggatctttaaggggccagggaatgaaaggtaaaatccaggactgtgttaggagagctgtgcctgtgcaggaattttctccaagccctctcccttctcctccctcatgaggtttctgacccttacactagacatgaagaaactcaccattctgataattcatcatttgagaccgactttcatatctggaaagtgtgcagtcctgaattataaatgttttagtactgttattacctgttcttatcttgcaatttgtttatttcactggtctggtccaaaatctgtttttccaatttgtttgtcgagagggagtgttccaagagctgaagttcaagtctcgtggtctgatttaatacctaaatgtaacaaaatgaagttcctattaattattttttaattagtttaactttctaacttccttttcattaaagtacccaagctacaggaaaacataacaaaaacattatttattaacccaagtatcttattttggcatatttttcattttcagaaaaggctcaatgtcttagatcacatctgagtgtgttaaacctttttactcttttccccacgtctctattttttttttttttgagatggaatctcgctccattgcccggggtggagtgcagtggcatgatctcggctcactgcaacctccgcctcccgggttcaagcaattcttctgcctcattctccccagtagctgggattacaggtgcgtaccaccatacccagctaattttttatatttttggtacagatggggtttcaccatgttggccaggctggtctggaactcctgacctcaagggattcacctgcctcggcctcccatagtgctgggatttacaggcattagccactgcacccggccgttatgtctctatcttggaaagtggttagtagttctggacaatggggtctgtgccaaatactaaatgttatttttctagtctgccatattttatttcatacaatgagacaagtaggagtataaaatggtcatatttcataggtggaaagtattttccctttgccgaaaacaaaatgctattctcatatttatttgtcactagacagagagattggaagtcacatgcttccattatataaaaatatagataatttttagcctgggatttcctcatttgtcaccacttgtttagacttttatttcttcttgccatttctccttcctgttttaaaacttgtttgaaccaatcgaagccgtatagcgtgagtgtgaagcggagcctcagccttgccgtgcgggcctttgtgagctactgcgtggcatgagcagtgcggctctcccgcggattctctagcgcctggttgcccttcagcaggaagaatcgactactcacttcctccatgtcatgcttattcaggatgtgatatcacatgcaaatgtcagtcagcattgttgccaaggaaccggagaccttgaaagaatcattgtttgctggtgtctttatgtcatttgcaggagccttggctggtccacagcgtgggtttcagggatggtcttatccttagagctggtttagttcttatcacaaaaagtcttctgtgagaataaagtccttggccaacgtaaggttttgtttgggttttaatattaacacctggaatatacatttggcctacgtcttctttgagtccaaacattctatgttggttatttctaaaaggaactggaaaattgtgtcctgtttaattcataagggttataacatgagtaaaattccgtgtggaggcagggaaggatggcatataagtcatgattggcccagtagtaattgtaaccattttcacatcacttttctggagagcatcaaaccgctggaccagcctgaaggcgtccatctgcaggggactgtaaattacccaggccaggtattgatctctcattccctttaagatatgagacctccagccacccattgttgctcaatttgatcgtctctcattctgacaggcttggagaatcttgcttctaatcagaaattttcagatttgaatttaagtctgtttcacaaaatcagtaactgctcagcaagtaccttcaaacagagtgggtacataattcagtttctttgcggccttccttaagctcagccatttttcttttttttttttttttgagacagagtctcactctgttgcccaggctgcagtgcggtggcaccatatctgttcactacagactctgcctcccaggcttaagcacttcttgtaacctcactaagcctcccaagtaactgggtctataagtgcacacaagcacgcctggctaatttttttttttttttttttttggtagagatggggtttcaccatgttgctcaagctggtctcggactcctgatctcaagcgatccacccacctcggcctctcaaagtgctaggattatagatctgagcaagcgtgctcagctggctcagccattttcatgtgtttaattgggcttcacatggaaaaactgcttactttccatctgttttcttattttcctgttatcctggataacatgatatctagtttcacaataggcgttttttttttaaatcatatgacgcaacacaagtacatcaaatgctatgaagtctctgaccgctataggatgtagcaaggtttgcattgctgctctgtcctaacactttttcattactattattattttttatttttttaaatttttgccaagttcccatgcttggatctaactattattttaaaatataagaaatgttgtagtttaaaaatgcttatgagacattttttggatgagctattcaattacccatcagtgttagtatcaaaaggtggggcatgtgacttaatcattactaatttattttaataggttggtgcaattttgccattgaaagtaatggtggccaggtacggtggctcacgcctgtgatcccagcagtttgggaggccaaggcaggtggatcacctgaggtcaggagttcgagaccagcctggccaacgtggtgaaaccctgtctctactaaaaatacagaaatttagccaggtgtggtagcctgcacctgtaatcccagctacgcgggaggctaaggcacgagaatcgcttgaacccgggaggtggaggttgcagcaagtcgagatcacaccactgcactccaacctgggcaatgcagtgagactctgtctcaaaaaaaaaaaaaaaaaaaaaaagtaatggcaaaatctgcagttacttttggtccaacctaataattcgctttagatatatattgatatattgacttttaaatctttagtttttatgacttcctaagatttaaatttttagtaccttatgatccgttatgtaaaatatttatgtatgtttttcttgaactgttgtgatattgtggaaagacctggtagtcaagtaatttgttattctattctcttatctgtaagtcttttgttaatctatcatttcactactgttttctctgacctcatccaaccatttttaggaagacaatgaaagaacagctgtgtccttctagaatgagtcttacgagagtggcagggcttatggcatctcccctctcatgtcctctcctggctgacgtctagcatttcttgatcctttttgctgaagtagcatttaggaataatatggagtggggattgtttcacttaaatctgctctttttttaaaagtattccttatagcccagagtaggaagccactgacttcagaagcatgtaaagaagccaggatgaggagtcagaaagcgggcttggccgccgagagtcacgaccacggccttgagcttggagcgtctgcatttgtactgctaatagcagcttttccctttcccacccaggccgttcgctgggtcacatgttgtgcatcatttagcatgtctctcggtgaattttcttcttttgaaattttcctattttgctgttattttactagtttctttctttctttctttctttttttttttttgagttgaagtctcactctgttgcccaggctggagtgcagtggcacgatctcaactcactgcagcctctgcctcctgggttgaagcaattctcctgcctcagcctcccaagtagctgggattgcagatgcccgccaccacacctggctaatttgtttgtattttttagtagagacgggttttcgccatgttggccaggctggtctcgaactcctgacctcaggtgatccacccatctcggcctcccaaagtgctggaattacaggcgtgagctactgcgcctggccactagttgactatttcagtcttctttctgttattattaatcactagctcatagaatctcacagtggaaagagaacttagcaatcacttgtctggcccaaccctttatattatttgaggcccagaaaaggtgagtgcctcattgtgatgcatttatttggttagtggcggacctggagccatggcagcgctcagggctcttgctcgggcgtagcaccatcttttctgtggctagacgcttctcactgtcccacttgtctccttctccataaactcattccacaggctgtgttagctgttgagattcaggttttatcttaactcaagagttagatttaaggccagagtttctagctctttgcctcagtgcttttcatttctcaaatgttcaaagactttaggacttagaaatggaaaatgattcccggagtccagaaagcaccagggagacagagggggtattcatcttgcagtggttgggatgcgtggcatgaaaatgactcacatgtcttcagtagatagaacacatgaaatttaacctcagtattaaaaacaaaaacagatttactgatttttaattcataagcagccatacatccttaatttcttatcaattcattccttttctcctgtggtggtgctttctttagtttctcatgccttcattgaggaagctcctgacgcgactgagtgctagtctctagctgcagggacaccgtgtgctttatgtggcattacttacttgggcttccacatcagttaacttccgcgtttgctccgctgtttggttcaacaggtttgtccctatttctatcatcacagccgtctggttctgtactgcattctgctgtatctctaccatttctttcttcatgttgtcctggatataattctcaagctagaaaagaacagtgttagaaggcagtcattagtcaaatgaccggaaacctgattcctaaatgtttgtcgtctcctccctatctttaaaaaaaaaaaaaaaaaatctatcaaaagacttgtaccttgccttccttttggaatcttactatttttttttatcattaggaaaatacagtgtgattttatttttatgcaaaatctggcaacttagtcacatcatgtaaaggagggagacaagctactggttgcttctgtgttcttctagaagtccatgtcatggcaggccacagagggtggtgagggcagccacagggactgctgggtgcggccactgtggggttgtgtctgtcctacccagctgcaactctgaccatgcagtcaggaaatgataatttgacacaaagaagcatcactatttctctcacattctagacttttggtttctccacatagacttgagaagacactctaagacagcatataaggagaggagcacccttttgattttccttttaacctacggaatcaccactcagttccacattctgtggggtcttccccaccttcctccgtattgagttaattcgacctattaaatttttcctaacatgtatgcatttttcacaattttgtcatttcatgtatcaagcaaacttttaatcgcaccttggtccatttatcacctaacgtgccatgggctggttcttctctccctcagttactaaagatgatgatcatgctgactaattttagcattaactgaaacacaagagaaggaagaagctcatttcactgccattggtatagctatccctgtctatggcagtaaaattacatgattatgtataactgcaagacaactgagtacgtgggaagagcctttgggcttggagccagggaagcctgccctctgctttatagtcttggttctaggaaagttgcttaaccttttgggaccctagtttcctcatatgtaaaatagggtttctggttggtcagaggagtgtcttaaagaggggttaagctgtgcttttaaagtcattgtgtatgcgtaactccagatacttagcgtttagtttctttttttttttttttttttttttaaataatctaatgatgggaaccattcttccattccctggtccaaagtataagctcgtgagtgcacaaaccatgttttcttccttttcacatagtgtaacaaacattgtttattacattgaataattgaaagatgattataaaactggttctggtgccctcctttaaaaacttagaattctttatagagaaaccattcgtggagtcagtcatcagacatgatttcccccaaaatgttaaccactaaataattctgtgctttctgtctttaagagtaggaaaataggatgggaagggtagagtttctctcttagagcttctttgttgatgcatttcatagattgtgtcttgtgactggtatcagatggttttaggattaggctggaactataagtttcctgtttccgatgccccctcgccatcgactctgccccacttctctaagctcccagctccctgcatgcccctcagcctggtcactaaggctgcctccctggcagtcgttctcccgtggatattggatgggtcagatgagcaggatgcatgagaggcacagtcagccctccatctgtggcctccacatctacgggttcaaccacaccatcaatatattttaaaaaaaaaataacaatacaacaataaaaaacaaaaattgtaaaacaatacagtatagcaactatttacatggcattgacattgtgttaggtattctaagcaacctcgagatgatttagagtatacgagaggatgtgtataggttatatgcagatctaccctgttttacggaagaggcttgagcaccgtggattttggtattctcgggaatcttggaatcagtcccccacagacatcaagggacagttgtactagagctccaagcatgtgtaaaatcattttgttgaaatgttactcaagccatccacccgcctcagccccccaaagtgctgggactacgagcgtgagccagcacatctggctgaagccttagttttccatatgaaccaaaacagagtagaccactactttaaaaaattaaagtattaaaaaatttttaaaaatttaaaaaaataaaaaatcagtcactgatacccggcaggccagcaaccatctctattataggcttcataaaatgtgaagagtctgaaatcttactaaccgtttctcagagttagctcaggctttttagtgtgtgtgatctttcttaattcattctttctccttcctcccctgcctttataaaactgtaacttttgtgattgaaataaactatttaaaagaagccataaatagcagttcgtaattctcccctccgctcatcgccatgggagtaatggaatttttgaggttgcagttaaagctgtgtgtcacccagaggcactgtcttagttactcctcacagcaccccagccaagataatatttaaaaagtttcattccgggaggcttggaactatagagatagactccagctggagtttagtttaagcccatactcagaaataataatttacaaagtggtataaataaaaagtcttaacctccttcttgatttcagtacttaagagctaaataaaaattattgtattttgtcactctaaatcatacaaccagagagggaaaatgaatcctctaatactgccttcccccatttctagagctactgagtcagatgtgtttgcaactctccagagatatgagaggattgtttataattgaaaacttaaagtcaaattccaatttgaaattaaacttaggaactttgaaagacatacaggcccaattttaaaaaataaaatttcttaacctgccatattgttttctaaacataaaaacaatagaatgcaagatcctttttaaattgctactttttagctattcaggatgactaagtataggttcacagtgggtgagctaatgtgtgtccatttatgttaatcttacataaaagcagattacaaatacacatgatgtgtgtatatacagataggtatatagcatatatgtatatagtgtctataaatatatacagctcttgaagcatgtatcatttaaataaaagaaaattctgtgtgatactgactgcattgctaattaattgaagtctttgggagaagaatggaacagaaccaaaaatgtgcagtagtagatattttgtgttgatttaaaaagatatttgagccagtcgtgatggctcatgcctgtaatcccagcactttgggaggccgaggcaggaggattgcttgctctcaggagtttgagaccaggctgagtaacatggtgaaacccatctctacaaaaaatacaaaaaaaaaaaaaaattagcttggcctggtagtgcgagcctgtagtctcaggtactggggaggctgaggtgggaggactgcttgagcccaggagagcaaggctgcagtgagccatgatcgtgccactgcactgcagcttgggcgacagagtgagaccttgtctcaaaaaaagaaaaaaattaaaattaaaagtaaaaatacttatgttcttactcttgaagtcattaaattaaggttttaagagaaatatatgatgtgacagtcaggtactctttaaaaacaaggaagaatactgtatatttagccccagaaacactagcgacaggaacagccacagtaatggtaggtactgtttcttggttgccggcactgcctgtgctgtatgggaatcgctgtgtcgggatcccaggcgcctcacatcagcacaggtggatgcagggctgagcactggaatgaccctcagcaaaatgttagctcaacccagaggccgcttcatacttttccagccttttaagagccaaagtgatatatctcaaaattggcttgagtatgccttccaattccaggcttcacaatgccttaagaaaacagacagaccacccacccctcagtggagggccatttttaccaccagaaaagcccagaattaaagatgaccaatgccaattctatcttctgggagcatcctgacaaaagaatctgtgttttcttccaaagattagtagtaatttttagaggtacagaaagactatggatgtccatcatatagtataaaaatgaacatttccaaataaagatgtcccatttaatgtagcctttccataaatcaccacgtatcaaggataatgagaacaaacctagaaacaaagccatctggctcatccacttggatagacagaccttgaaatttccctgtctcttgaccttgatgaattagttattttctagtttattgtcctagaatgtctttctgtttagtgtctctcttatttttactggctgtgactgaaacccagaaatatagaaacctgcccagaaatatgaaattccattctaagtataaggaagtcttagtacaagaaaaaaaaaaaaaaaaaaccaacccagtaaataagccatcctccactggcagcaccaaactccacttgcctttggagaatgtttcccatccctgtcatctgcaccgaactgctctcatcaaaacagttccaagatacttgaacctcccgtgggaggggacccggctctttccaatttcacatgcatagcatgtgaaacatattcatgtttcgcaggaatgtttgccatcgccttcatatctgaagaggattattccatgagcgtgatctgtaggcacacgtgtctgaataggtcctgctgtatatgtgtgcgaggacagtgtgtgtttattttgtcctcttcttgatggttgacacagtcggcaaagtgtggggccttgggctgttcttcctttctcagaactcaagtgagttatgcaagtttaacattgagggccacagtgatccttctagctgcatggtttgctgcttagtgttatttgatttgctaaaagagttgcgccccagacatagtctttaaaacttggcagcgcatcgaaactcaagcaaccaggatgaaatattttaatgcaacatatatatatatatatgtttacattaatatatatatattttagtgcaaaatatgttctgaagttttttattactcccacaacgttttgaatgatcaaatttgacaggaaaaataggtccatttgtgaggcaactatggcagattgattacacatttaaaagtttatctggctatcttccttctcaccaagattgtcatcattattttttataccaaaagaaaagtaatcttgaaactggctcagtaaaggaaaacatagataatatatgaaaactatccccaacttggagattctgatgttgatttctcaccaactgtagatgctggttgagagatcctttctatttaaataaaattcaaggtccttagacctttttactaattagtttttgtccatctgagtgacctaaggtggacaaaaactaattaatcagagggtctaaagaccttgaattttctggtaaattaacaaataatttgagatttccttggaaactttttactgttgcccatttcaatttcgaaataggattttgcaaccatctctcacacacacatacacgtttttctatcccaatgatccatccatcttcccacccagcccttccatttttctagtaaacccttgaatttttctagtaaattcacaaataatttgagatttccttggaaacattttactgttgcccacttctatttagaaataagatattgcaaccatctgtcttacacacacacatacacgttttctaccccccatgatcccatcttcccgcccagggtccactgtcctctctgtctcttgctggccacgcatcccccagctgctctcctttcatcccgctgtcagagtcaggaatccacatgcaaagctggtgaccgcagctcactttcttcccttgcaggtttgcctgaggataaggtccagattccttctttttaagacacacaccgcctcctgactggcgcccctgatcttgtgggcctcagacctgggcgcgcactgtccttggctgtcccagctgcccagcggcctcataccacggccgcctttgtatctcctccttgagtcttctcttcctcctcaggtcccaccatcccccattgcatgccctaagcaaagatactcgttttgtgtttccttttgatatcaaaaccattttgtatttgtgtcatttcattttaaatctccacagacaataggttaatgttcttgcttgcttggtgaagagtgaacagaatcctcaaactctgcaaccattctacatatacaccctagtaacaacaagcaaaacatccactcttagaattagtttgaaaacttgagtgtaagattattaaatccagggatattctatttgggaggcttttgacctaatgttcttggttccctgtcatgaggaaactctgaaacatcatttgaggtctccagacagaaaagtggcaaaactgggctctcctccccctccttttagagttgggcttgtgtgtgtgtgtgtgtgtgtttattctggagattttgctgcctaagcagctgtgtactcagcagtacttcatggcagaggctgagcctaaagagggaagggctgggagatgcggattttgggcagcactttgtcctcctaaacccctcgccagagcctggggggtaggcacagtacccacagtgagaggtgatgttcacatgccctgtgacgtgggaagcaagttttctccatatattgatgccagatttgaatttctagaacctagaaaagcccatgccaaagctacttgccatctgttgactgtttttatagtcttggccttttcttcacgttcagtgtaaggccctagaagttgaggcaaaagctaaaggccgagggagggaagcctggcctctggtgccaatttcctagtgggtattgtgacttctcttagggagcacacttgccttcacctgccctgaccacatggacgcctgcccacatagggtcttttaagcacttcctgaaatggatctgttctgatctagcctttttgcttttttctagtcatacttttttattgtcttttttttgagatggagtctcgctctgtctctcaggctggagtgcagcggcgtgatcttggctcactgcaacctctgcctccctggttcaaacgattctcccgcctcagcttcccaagtagctggggttacaggcgcacaccaccatgcctgggaaatttttgtatttttaatagagatggggcttcgccatgttggtcaggctggtctgaaactcctgacatcaggccatctgcctgccttggcctcccaaagtgctaggattacaggtgtgagccactgtgcctggccatttaataatttatgagtgactatctgatactgtatctagataaccaacccctttcctactttcgctagtataagagactgaaagttcacttttggccactatataactccaagatgtattaggaaataagtttgtgggcctcagctggtggcattctaacattaatagtccatgcctctcctcctgtggataggtacaccctacagtaatttgagtgtaccagaatgtctgtgctctggcaaatcctatccgctttgctcttctttgagtgcagctgcatattctttgcattaatttttttcacatatatttgaatatatgtttttccacatatattcatatcattttacctctttgtgtgtttcccttaccactactccaaaatttgataaggaaatgtgcttttcccttcaaaatgttccatttattttctactgataaagtggctatttctcatcaatagcaggcattttaaatatatgtaagtttaaggagactgctgtagtaacctcatgtaaatttctttgggcatttcatatgcaaaaggtgtcacattttacacgagtgtcttttagaggtcttgtagggcacatgtatatttaccagatgtctgtgagcgtgcagcctcatggcacgttatgcatacctgacacttgcacagattcctggaagatgaggagcaaatacagtgcaacagacgttgtcaggccacgtctgcatatatagatatatacacagcaagaatagttacagcagcttacaatgacaaaatgcttctcagtgtgtatgtgtgtgtacctctgtctcaccagattctcacactgccttagcttgggtttccccaaaagcagagcctgagacaaaggcaggcatgcaggaagtttatttaggcagtggtcccagagcgcagccatgccgaacaggcgcgggaggcaggggcgccgcagggtggttcgcacacgtggactcaggcggccaccgccgcgctggctggtaagaagccccacaggatctcccaaggagccctgggacagtgtctcagaacatccacctggggcaagaatggggactgctgtccccagggggcaggtggagcctagtgggcattcatgacccaggttttggagctgtgcttgcgagagtgccgaggaggctctcatgggtgtcccgaggcagcttggagccaacgtccctaggcatggcctgggggtttgtgggaaggcctgaggcaaggcctgtctctgagatgtcctgaagagcaagttgggcccagagggttaattccgagcagcacaagagggtgaattctgagcagcaccagagggtttccctgacacagcaggggatgctttgaggcccctttaatgaaggagaaaaatgaggcttagagaaagtcagtgcccaccccaagtctcatgggccccaggctgtgggcagtggctaaagacaggctagtgggtaactcggggccacgtggaaggggagcttgtatttatagcccccagtcagcagcgctggagaggagaggagaggaaaagcagtgctctgagaaagacaatatttctagtagattggggcagggcaggcctggagacaggaaaccaaagccagggttgtcatgcaggagtgagatgaggttgcagcagcagagcgaatgcggagacgctcggcaggtccttggtggcctctgagttattctgcagacttctgccattcgtctattttttgggatactttgttaaattctcagcttagaagatagtagtgatgttttccctacagagatagaagaaaatataaaactattttctttttaaaactgtactgaatgtagggccgggcatagtggctcactcctgtaatcccaatactttagggggccaaggtaggaggatcacttgaggtcagcagttcaagaccagcctaggcaacatggcgagactccatctctacagaaaatttttttaaaaattagctggacatggtggctcatgcctgtggtcctagctactcaggaggctaaggtgggaggattgcttgagcccaggaggttgaggctgcagtgagccgtgatcgtgccactgcactccagcctgggtgacagaatgagactcaatctcaaaaaaaaaaaaaaaaaagtactgaatgataaatgattacaaatagaagcagttaaaatttagctctaggaatgagattgatgcatttaggctacaatataccaggaacttcctttttaaatgaaactagagcgttcttgcctttctgaatttaaggcacactgaaagaaaaaataataataatgtaacaaaatgtctcagtgtttttctatgccaaatagaatcttatgtatatctgtctagagacatatatgcatacatttgtctacacatgtgaggtaggggtgtgtgtgtgtgtgtgtgtatctgtgtgtgtgtgtatgtatgtgtgtgtgtttcagttctctaagaaacagacattccaaaacttgtgtgtgtgtgtttcagttctctaagaaatagacattccaaagcttggtgggcaatggcgggaggctttagaccctgtaatattgtcggagtgtcactgtaagagggacgctagcgcctgggtcacagtgctagctggtagcagagtactaacttaaaccctggtctcccaacaccccatcccgcactctcatcgctgtactgatatgcctattcttatcttaaaaaaaaaaaagtgctgtctgaggagcattaacattcttactttttcatttttgaaatgaagtataaagatactgatggccttttacgtctcctctctgccctgtttttgctgtctctttctgtgttacatgggtttgccaaaatactgggtggagctctgtggaggaggtagcatgatcatctctgaagtgggcagtttttttctttttccaataaactgaatttacttggtcacaatgactatcctaaatggctagaaaagggaaaaggctagcgaaacttagatgattttctaaatttagataattttctagaagacattttccaggcaaactagtttttgctgtcctttataaggccggcaggaagcgtgtgttgtttctgttttaaaaagggagaggagcggacttgggaatgctgatgggaatgcttgagaaatctcacagcagggctgtgcgtgccctgccgggtcccactgcctctggacagaaacccccgcaactccacccccagccaagactttctgcttctttatctcctctttctgctagcacccaaaaagttgaaagaattccaatggatagaatttttgagataatattggaagatgctcaaaatacacaggattaatttacacgaagactcagcgggaacacaagccatcttctgtacatgaagatgcactactgacccgccgtccgcaaatgtgtttgtacagttactttctcagtatgggtgatggctctccaacgaactgctcctcgtctcctgcctggacacccttctctctgtgctttcctgggttagagtaaatggatgcaaacacacatttccgtgctctgcagcaacttgagactcctgtgagcaaaacgcactgacgggcaatgtgcgtgggtcgtggggagcatccagctcccatctgcggaataaacccgcccaaaccatagggaaaagcgctgtcgtataaggccaggggattttcagaaaagaaatgtgttctttcctctttgatttttgtgttcataaagctgtaggtgcagctttttttaatgtaatgatttcataaccgctgaagttcgtgcttttctgaactatttaggaagataatctaccccttgtattggatgagatgatctgtcccttcgacctctggttcagttcccattctcccaagtatttaaagctgcgagttttttcatattttcatatttatttacataatttaaaccccctgtgtgcatggactttaaggagctgtacatctgcctgggctttgcagaagctgaaagggcgcaatctttttataactcacattagaaacacagattatttaacggggctatgttttgcaccttaatctttaaagttgcaatatattttaagcattttaaccttgttttagatctgatcagcagtagaatgttttcagataagaaacaatggagcaaaagcaaaacaatattcaatacctagatgatgtggcaagacagagaatagtataactttttgttttccaaacataacttttatcttcatctcttgatctgaaatttggtaggaagtgtaacaagtacgaatcaacatatttaccatttgccatttcaaatgttgatagtgaagctgggacctctgtttattatggaagaccatagaaaaccccataaacacgttctacttctgtctgtggccagcagtccagcaaaaatgttctaaaagcacatgcactgtgttccgtgatgattatagtttgactgtgctggaaagagagactgtgaactgcacatggtgattatgactttgggcaaatcactgaacttgtaattatgtcttccaagacctcctaacccaaaataagagagtattttactacaaaatatatgttacgtcaaactgttttttacaaaataccagctctagggatgtttccaagtcattttcggagagagtttgtcgaagtttttttcagggtgtgtcattcatgtattggagggggagagggttgagtaagaaccgacatgcacaacttggccatgaaatgaagcgcaagcacatattttatttctataggattcctcattctaaagtaatttttacagaaaatggcactctaagaaggaattcattaagataaagacacagatacagcatttagagttacactttgccataaaagagcctcccttacctcctgacttgaatctataacatctgctgaactgtcgacatcaggaagactcgaaatatgttttgaggccaattatgtcatttcagattgaacctgctaacatcagattctttggtcagtagtctcactagttttgttctcacaatggaattattattttgatttttaaatgttgctccatggagactggtatgatgagctcatgctctgcagttccattttaacaaataacataatagatcgctgtcaaatgaatgccatcacagacatcatgttgggtcacagaagccacaccctaggagtgcttactagatgatccatttccatgaagctcaagaatggaccgaacttactaaaggtgatagaagtcagaataatgtcttccgggtgggaggggtttgaggctgtgaactgagcagtggcacgagggagccttctggagtgctgaaaatgtttcctagatcttgacctcggtgctggttacatgagtgaatccatatttttaaaagttatcaagctgtaaatttcaggttagtatactttatccatttcctgtgttttatatctcaaaaattcttttaaaaactaaaagacatttagaaatgaaatgtttgacaagttttgttgtgacactatgaccctagttactatgggtggttttatttgtctctgcagttttcatctaggagcacctaaataatgcctaatgaaatgaactttggaaaagtaattttaaagtaactatcttagagaactgtggattaaaccattccagccatctgatgagggttaaaatgtatattcgtaatctgacattccaaaacacgattctttccggatcaagcataaaaggcatttgctcttggaagaccaagaaagaattcatgtggttcccattagtctaaaaataaataataaataaataaatgtctgagtcatgtattggattttgttggatttcagtggcttcaagtataggaagaaaatgatttgtgctattaataatagttctacccattgcccattggaataaatacaagattactctgagaaaagtgaaatcgattgaatttagttctgctttgagctactgcaatgcaagtgtttctgacttttgagacatagtataaaaaactgaataaaataactttgttcatattgaattgagttggggaagtagcgatatttgtgacattggaagccattgtcattacagattcatcattacagtacagatttgagaatcaaacacacccggtgtgagtcccagttcagttccttaggaactactggctcaatactttctaacatcacatttctggttggtaaaacaggtatataaatacctactgtgctatgctagtgtgaaaattaagtggaatgagttagcacaattcccaaactgtgtgccaaggcaccctgggtccttgcagcaaacaaattggagtaagggagacagtctgaatattcaagggcaacccagcagtgttcaatgactgtcagccactggaagaattcatagctcaaagcagttcaccgtttcaacagtatcagcttgtacctctgtaaagctaggtttttggtggttgctgtttgtgaaaagcaagtgctacaggaaaattagcatagagcgtaaaatgcaggtggcagtgtccaatttgattccaaagtttgagaagccaggtgtgcctaactggcaaatatattccattcatacgtcactggggttacttaagaaagaaaataaaggatctttttttaaaactcaatttatatgtatattggtattttcaaatagctactaaattgtcagaacataaatacttaaattatttggagctaaccgcttaatacaagcaactgttggcctagagataaatagagaaaaaatagtgaatcactaagggtcccatgagctgagaaagtttgagaacaactagcctagaagcttgcacttggtaggatataaactcaacgtaccctcttcctccccttcccccaatccaagtattgcctttaattgtaatctctatgatttgatatgtttatcggaaagcgagtaagtcaaaaagaactaataaattgtgtaagaccttcattaagatgtacccttccgtgttttcctaacttctgaaatcactaggaaaaacagccatgttccttgcaagctggctggttagtcctgtcttctttcaggtgaacagcatttataaccacggtgtacctcggaagaagcgttctcagagcaacatgcacgtgttccgtgtgtaccgtggttgccttcgggctaatgcgtttttggaagtgtagataggtgccagttttacaaaactcatgtggcctatttctgcttgtaatttatagtttgcctcctcaccatcctcacttgctctaaggtgaactagttttataccattagattatacagaaaagtcaaatttacttgcatgccacagcaattcgggaagtaaactttcagtgtgattctccaaatgcttgtggtaaaagtacagagacttgaatcattttcccataattagtttcagttctggaggtccgccccctctctttaaccctcttgccttgcatatgtgtctcttgcaatggaagctagtggaaatttcctctcccctttcactccactgccataagttataaaaagcatgccattcagaactgacgttttcttctgcatgcttgaatttttactcaacaactggaaggggaagaagttatttccagagatgtttctctgtttatcaaaggggcgcagagtcacagtagcactttggaccaccgtagaatggctgactcacttgcctcatcagtagaggggcacatgttcctatcaaacagtgagtgcctttgagtgacggtgtgtgacacacagcacagcagcaccatttctcagagctgcagcaacactggttcacacaagtcactagagattcccatctccactgactcactcggtgggaacaaaagctcccatgccggtgggaatgcggggccaggggagcaccggaagaagggagccgtggcagaggttttcctattgttaggtttgtttgtttgtttcagtgagtcatcttacccccatttttttttttttttttaaccaaaactcactgtggttacttctctagtttgggttatgactcctacgagccagtttaattttatcagtggcagtgaattcttgaacgcttccctcagttgtagaaatttagtttcacatttaagtggtccaagtgccagcttaaactttgtggtttagtgtctttactgaatcccccctagcggaagaacctacattggagttttggctgctctttgggattcaaattatgagtagttggttccactggaatcttggccttctcctggagtggcttgaggcggcacgctttgactttagaaggccaaagttagaacctacgtgaaggctttgtccaaaatgcctttcctgcaccctggcattttcaggtggtgtgtgtagacctgacaggactctactcgtgcgtcacttcccagctgttggtcccctgccacttagatgcctttcatgggcaagtccatgctagcctaggaaatttcccgaaaatggcagtgataactcagaattaggattttgatcctcatctcaaccattatccccagtggtcgctagctctcctctgcccagctcgaggaaaatgctgggtttttcattgcagcttacttgcatttcagtggtcccagcaagcactcaagaggaaagatcagaccagccaaacttgcaaggcaggctgatgagccaaggtacagaaagtacacctgatggatttttgtaatgatggccgtaagtcatagaaggtgaagcttaatgcaatttagaaagatttgaaaaaaggaagaaaagtcctcgtgctcacagaagcaagctcccattggcaaaattattgtgtataacaagcatctctctctgatgatgctggaaaaaaagaaggtgctatcagggagggagggaagatttgaaagaccagagtgagcagcagataggcccttgggtccttccttttattcccaccctcttttccattggctgttgataaagtttcatcactttttagctgcctgttgtatttcactacctccttgttaacctctggttataacctggggggaattatgtttaaccagtacttaatgaatcaatctattcctcaaaagttggttctgggcatcacggaataaacaccaagaccactcagcgtattttctgcagagtggatttcattagaaggcaggttagtcttggaactcagtcaaaacagctttcagtcagtccaactccacagatttcagagatagcagtacaagaaaaatgatacatgggtttgtacagttgagtgttgaagtgttgacttccataaaagaacacaaatgtcaatctacagcagtaccatgggtacgtaaattgtgttatacagcgaaacactgcacggtgatggaaaagaagaaactttaacatgcacaacaacatggatccatcacagaaataataaaagagaccaaaaaggagtatgtactgattgttccaattacatgacattcaaaacctagcaaaattaacccatggtgggtgacagagcagagtcaggattggcgttgagaagagggggatattgacgaggaggggcctgaggaagccacgtgcagggtgggaagccttctgtatcttgagctgggcagtcattacacaggtgcgcacatatatggatgaggaggggcgtgagggagccgcgtgcagggcgggaagccttctgcatcttgagttgggcggtcgttacacaggtgcgcacagatacagacaaagaggggcgtgagggagctgcctgcaggggaagaagccttccgtatcgagctgggcggtcattacacaggtgcgcacagatatggatgaggaggggcgtgagggagccacgtgcagggcagcaagtcctctatatcttgagctgggtggtcattgcacaggtgcgcacagatacaaaaatttaccaagttgtacactcaagatttgtgaattttattctgtgtaagttatatctaaaaaaagaaaagaaaagaaaaagctagattccctaaaacagagacagcagggctcgagtctgagctagctatagccatgccagcagctagatccatgaaaaggttggggttggctttgcccaggtgatcattcggggacgggggacgtgctgtgaatggaagatgtgcctgctgtcagcactgatgttgcccaccctttatttctacaacgctgtcttcaaaagaattacatttcaattttataccaactatcgtgcctcctcatgaatcccttccccgcacaacctggaaaccctcgcctggcgtcggctccatctccagatgttactcactggctaccgctaggtggctgcgaagggtggcggcgtcactgatgcgcagctcaggcagcagccatggggaggttgaatccccggggcatctgcctctccctatgtgtgtgggtcctgggagtgaggcagtgtggcgtggggctgttgcacacacccccgactgtagggctgcacccagacacgtgcggtgaccccgtctctacagccgcttgttgccctggcaccaagccaaccactcagcatccagcgcgtcctcacctcccctccggggtgaagcggaaacaagggtatgtgccaaaactggcctgctcaccatttcccagattttccacatttgttcccactcggggtgaggggtgtgcttctggtgtgacagctgtgggctgtgtagggtggcgggcgttggtggtgaagtctgtcggccctcctgacccacacacgagggggtgtggattttatattgaaatctttttaaaatctgttttattgtaagaggctctgaaaggaagaaattttatcagagttttgcggcctgtgtacgttctgatacctctcagagctggagtttcttacccatataggacaagctgttgtgaaattgagtgagacgatgtaagcacatggcgtgcacctgataaatgccagctgccaccacagtgatggtcagcagcgtggtcaccactgtcgtttcacaattacagcccaaggagcccaaggggaaggagtgcctctctctgttttgaccttctctgactgctgtcctaataaacagtgtcctttctacaagaaccctgtagacttttgaaaccaacaagtgaaggcactccaaggcccttgttttgagaaggggtaagtgtgctaggtaagggatttccttgggtgcttaccttccacggctcctgggcccctgactcgaagctgaccatctgtgctgatgctgacttaggattttaaatcacttaaatttgagctggatagagaaagggtcctagttaagctgagagggctgcttattcgtgattttttttttcttctttctcatgcagagactgtttattttagtggtagcggtatttaggggtgaagaaggggaaaggaagaatagtgtgccatcaattaattctatgcatgtcagctgcaacgccttcatggcacgggacaggccaattatgtaactgtaaacaaattatatgtattaaaagttgtccaattaaaggaaaaaacatgcatggatttatgtgtttgttattacccagaagggagccatgctgtacttgaaaatatgcaaaatttcacatcacaaaatcaccagttgttgtttgaggggctggtgttctgattagtcttaattttttttaactcataacatttttgtcccagtcatcaacactgttaagaacatgtcactggtgcagttaagttaaaaatgattcaggtcaggaattcctgtcattaacaattttttatattaaagttggaaaagtttaaggaaatttaagaacctattccttaatagttaaaaatagtaaggaatttcatatacccccaaatattaagcataggtaattagcttgtggttgggatttgatggttttctgtttttcagcaaaatacaataacgtactttctcgagcagaatttttacaccaacatttcccattaagaccagtttgtttagggaatttttaagctacatctgtatgtaataattttttgagattccaaagactacgcagtctaataaaactctaatacttcaactatcttcagactaatgtttataattacccggtagatgaccaagaattgatatcatctgttgattccagaaattatggcagagaaaatgctgtcaggaacccaaagaaaatcagaggaaatggtacctctaagaaattctgaatcttttctactaagatatgtggcttgactgcttaaccccaaaatgcctgcttagaaggtagtttggggctatcttgtaatactcatttagttcctgccttcttctgccatagaaacaacatgcagaagcagcattgcttacgactcacactgaacctgaagggatgaaattacatatgacgatggaatgtggccatattcacgcagtcacagcagtgtgttgcccaatgacagtactggagcagtttccacagaggcactcatgcaatatgcagaatacagacattttacacacacacttacgatggtccttttcattgtcgaaaaggaattcattatctttcgagtaaacatgtgctttgaggtatataactctgaggtatagaagttagaacatttaacccgattagggtgactggaattataacctttaactaatgtgagatatagtatagatcttgataagtgtctttctggtgttcctattaaaattcattataattaccgttcctgcaattgtgtagcatcttacagtttccaacaccctgtgctagccatcatcttatttgaaacacataataaccctacaagttcactgatgtaggtaagaaaactggtaccgtttctgaagatacacagtgattgtttcggccagttaattaaggcaagagatcactcaacaattgttctacagttattcctgcttttttttttttaactcactcattaagtgaaagaagccagtccgaaaaggctgtatattttatgattccaactgtatgacattctggaaaagggaaaactgaagatagtaaaaggatcagggtttgccaggggttaaggggaagaagggctgtgcaggtagagcacagaggattcttagggcagtgaagctgctctgtgtgatgctacaatggtggatccatggcttcatacattggtccaaacccacagaatgtacagcaccagatgtcaactgcgggctctgggtgataatgatgggtcaatgtagattcatcagttgtaaccagtgcaccactctggtgcaggatgttgatcgtaggggaggtggctgtgtgtgtgccacggaggggggatatgggaactctctgcactttactctcgatgtggctgtgaacctaaaactgctctaaaaaacatagtcttttaaaaaatcatttactacatatgaaaaggaacaagtaaagcaacaacaacaaaatgttattgtgtactttcagattgcaccagtaaacctagccagccctcactagggtcttctgatggttacatagttaaaagtacactagcacaccgggagaataacttcagaggcttgctggtctaatggtaattgcgtcggcttcacacgtcaacatttttttaaaaattagattttcttgaatctgatcatgtccaagatacctcttattttggtatagaacgcctttattcaaacaacgggagaacatgaacatatccctttgccatagtttggctaaattcctgaggctggctggggccagaaacaaaatccctgaaatggtctcaaaatttttttttttttttttacctctccccttttccttctggttggtggtcttggggcctacgaggcccctcaggcagaggggaaatggcagtttccccatccccttttgggacttcttgagcagaaaagcgaatgtcagacggtccttataaagtcccacgtgattcagccactgaggatggcactggctgtggatttacatgtaagacaacttcatggcgtattttcgccttttgctgttgaatataactaccaagatatggtttgggcagacaaaatagaaatcttctgtgtgtagcatgtccagttggatactgttagtgacatagagagacgagcgcacaactcaggtttaaccttcatccctgaaatttgccggaacagtcataatgaaggtgctaatgtatttcctgaaatactgagtacttcagacagggagatatgggtggtatctagtagccttgtgataagacccatattagactaatagtagtcttatcaccagattaaaccacctggatagcccacctcaagtcatcaagagtgttaacatgggagtaagtgtgacaaatgcccaggtggtctggactaaatgtgacaaaattgagaaatagaccctacaagatctggattttaaaaagagagaaaaaaaaaaatggaaaggctggctgcttgcttccttttaagactttgttcacgttctcgcccccaaaagccaattatgattataatttatcagcccacaggaaatgattgcttctctatgagacatcgtcaacatgataaaataatccatttcccaagatttctatatcttagtatctcatctctttaaaaagctccattgtccataaaaaattataaaattacatatttttacatgacaggtaatttttaatgtatatttttaatttggttgttggtttttaaaatagtaaaatattaaatatcaactatgaatattttgtggtggtaagttgtcaggttaatgtaaagattccaaaaataattcacagacatgtggaaagttgctcagagggagaaccagtctgattttggagaaagtaattaccatcagaggagccctcggagggagcgggagagtccacaggtttcaatcaggttctagatgaattgcaaagagaaaggttttagctggttgcaggaggggctctggtaaaaggattaagtccagttctcaggagttttttaataggtttcacatcttttgtcaagtggtgcaaggaaggattaggacagaaaagaaaggtgatttcatggagaaatatctaattaaaatattaaagatagtcggatggcacacctgacctagagtccaggcagtggtaggcagagttccttccccttttttttaaaccacacataaaacagtcattttaattccaacaaatggttcatactggtattctaaaccactacccatgattttttttactctttttatttacatcaaatcattcaacttcacatcattttctttttaagcattaacataatccaagtgccaggccatttttggtgatccagtctgtagaatgtgagatggacaataacaatcaaaccgttttcaaactctaatagtgggaagagaaggccacatggaacttccctgaggctgaatttcgtcgtcctgcctttcaagtggtgtcctgtgaaatccagcgtttccccctgtcaacttccagaacagggctgtaactagatgtatggtttgtaagaatatcccatgtatacttcctcttggttataacataatttgttttacggggggtggtttgccctttttttttttttggagacaggatctcactgcgtagcccaggctggagtactatggtgccatcctggctcactgcagcctgtgcctcctgggttcaaatgatccacccacctcatcctcctgagtagctgagactacaggcatgtaccaccacgcctgggtgatttttatattttttggtagagacggggtttcatcgtgttggccaggctggttttgaactcctgagctcaagcgacccacccgcttcggcctccgaaagtgctgcgattacaggcatgagccactgcacccagccacataaatttgtttttagtcttctgaacgattaaatagttgtaccaattataccaattgcaccaattctattacaaggtggaatttcttatcgttcctttacaaacaggatattcccagttgcttgtttttgcttgttttcctagcagcttcagcaccatcctcacatagaagggctggcatctcacctatctagaggtgagaacaaagctgtgctctcagcaatcggaatctgtcaagtctgctgtggggacttggtatctcaggcctgatgctggcctaggagtgccctgcactcgtctcaagatcgatgtcccagtgggcgagaattgctgccaagactaaccaagggtgtcaaccagtgacttaacttctcaggctcacttttttttttatttttaataaaaacaaattgttaaagaggtaatttaaaatatgtactatataataagtactacagcatatacagtgtttacatacatataggcattaaatattaagaatgtttatttcagaatcatataattatacctgatatttactttttgtcattctttgtatattctccattttttgcagtatctatatattacttgggtaataggaatagcaaccattgagaaatagttctaattgattttccttttataaaagggtttccgtgtagtgaccaaggacttaacatcatccccaccccacagtccctcacacgcctgactccctttgtgctgtgtttaatttctcatttcattcatttaccccttctgtgcagcacatactagctgctgctacactacacgttctgaccaaagcatagtgtccccctggggcaagactcttgggaattgtctttttttatttttttttcattttttagggtctcactttgttgcccaggctggagcgcaatggcaccatcatagttcactgcagccttgacctcctgggctcaggcaatcctcccacctcagcctcccaagtagctgggaccacagctgcgtgccattgtagagatgggggtctcactctgttgaccaggctggtcttgaactcctggcctcaaagtgtcttcccatcttggcctctcaaagctctaggattacaggtgtgaggcactgtgcctggctttaggcattttcttccccctctgacttcttctaggcacctagaaccaacactgcctggacatgtgaaggcactcgataaatattttttgaacaaataaatcaacttgcatggctcctgccccaaactggaaaccccacctaggaggggtgggcggggtcatatggtgttcactcacttacgctaatgaactgagaaataacgcacttctgcccaaattcatgttcattcacactcctctcagcagttttctgcagtcttcccagccccacggaaaattctgcttttgtcagaggaggggatatgcgtgctttcccgtgtttgctttaccgctgggcaatccatacaaggctactaaactgcagagggtactggtgttagcatgccccgtgtttataagggacttaaaaaaatatacaggcttgcatccaccatacctaccatacttgtgtactagagatattctcggggcaaaatgaggtgaggtgtggaaagtgctttaaggtgactcagagccaccctgttgcgattgctgccttcgtgatgactggtgtggctgcaaagttcagtggctgtctttatatcagaataattctagaataatttaggagaaaattctcattgttaggttccttcaagccaaaggaggatgtagtgaaaagagaataggtgttggctgtctagatgggccctgtttaattagagtcgactgtatcagttgccaaatgaagccaatcttacagggccatcctatagaacaaatatatattttttatatttaatatgatatatatgtgtgtgtacacacacacacacacacacacacacatacatatatacagggagagatagaatggtttgcctgctgacttgccattaagtaccgtaaacatcctggaaattgtgaacagctaattggaaaacagtctgtccgtgttcatgattcattgtatgcatcctctagatctcaactcaggaaatccacaaagctgaccaggccctgctgtcattttgtggccagatatggaaagatataaaccacctcctttcttccctgtcaaaacagttgtgccacgtcctccccctcttcctcatcttgactgactccctcacaggtggtgtctctgtctctcctgcccctgcccccacacgcacctttagttacctcagtctttcaaattttgctctttgttcctaagtacagtcttccttccaacctctcgtcatgtcatttttgggccaggaaagatcctgattatgctataatgccactgtacgtgttttaaaaagaaggaacgctgtacatttgatattaaatttggcattttaaataaagggctggtaaaaaaatctctgagtgctaatctccaagaaagggatggaagactggggaaagagaatctacttcctatttccaccattttaatagcctgacatatttttttaccttgcccatatcttactttcataacatttttgttttattttttaaattactcccatggcggtagagttgatttgaactcttgtttttcaattttaaatgtacaaaatttcaattattttatggattaaaataagcaccccagaccatcctgagcatctgatcaccaatggtaagaccattatccttctcaagtttcatctacggtaactggcttacagataaacttgtggattacaacctgtttgacaactgtaaagagccacattgattaaaatcagaagattttcagagttcagtatttagactatatggattatctagtgtctcaatagaaggtaaggttatggaaatccatttcctagttctaaactctgcaagcaaacaatcatctccccatagtgtgatatctaaatagttaatccagtatgtcagacaaccccatttagtaaacaaagactacttgaccatagaaaacatatgatatatgtataatatataatccatatagagtaaacatgtattatattttatatactgtataggcacatatcatactatacatatacatatcgcataagagatacagtaaactatatttgtattttccaaaattaaatatgttgcagttcccctaccatagtgaaactgtctcttctacattccttactgcattccttactatatagtaatactaacactgagcacaatcatatttcaccactcaggatgtagccagcggatacagtaatggttcttgtcctccgcaggaggaccacgggagaccagtggctgtgaatgggatgggatttttttctttcctctaatgaaccaagccctgggttttattgttgttgttttaatatacagctattgagtgttttgtagccacacacgacaacacacacacacacacacacacacacacacagagtccctagcaagggcagggtggggctagcgggctgggttcccctgggagcccctcaccatccatttctcccagtgacggcagctatgtttgaagagcataactgcatggtttcctatgcattcattcgtgagtagtagctctcatatattattaaaaagatacactattattacttttaaagaaagaaaaggattgcaattcacatttacactttccagcctgttcttgtgttgtttaaaaaacaaacaaacaaaaaacgatggcagaggaaatgtttgcctccgtagtaggcatcaactttatttttcaaatcattctgttttaacgtgttcatagactgcagttgtttataggtatgaggcactcatcagtgtgaaatagttctttcctttccatatttcctcttatcagaaaaaaaaattcctgtggtctcctagcaaaatacaatccattttgctaaattatttgtgagtttttataaagtgtgtttaatatcaccagggcagaggttcacactagttgcaggattagcaagagagacgtagcatgagtagtgtttggtccactgcagtgtgttttgtgtgctagcgatcatgagtttatctgatccttgtttaactactacacagtgagtaagctgtcctgtattgttccattcatattcctctgagttcattcagaagcctgacacttcctttgccggacagattaaaggggcagcgtgggaccttttgatgatgtgaaacctgctttcttagtctaagctccctaggctatgctgaccactcagaggttgaactactatttatttgccctaaaatgaaccagaaacttggtcttagtttccttcctgacacatgttttaatttcctaaaagtgtacggattttgtagtgggttgtttttgaatctttcatttttagtgctgatccaggagagaaaggagatatggaaacatttttttcaaaaaatagctcaaaagaaaatatgtaaaaccatgaaaaacccagaattgtgctgctgctttctgtgctaattaaatcagtgggtgttaggttgtaatgataaccctttaactgtgtggcttatctctcattccattttatattattttcttcctcatgagaaaatcagtgtttattatcacaggtgacaaaacacaggagaaaaacaaacagtgaggttacatttaatcactttaagtgggtttcatctttgcttttttgttttcattcccaagccagaagccgtaaaccgagcgagagtgcaaattgcctttctcaggtgcacgttgctgagataggctgggagaacaggtgtggagcccgtgaaaagataaacattaagtcattcttggggaaacggtatttagctagacagctgaagacggacttttgaaataccattgtgctactgctgttcaaatattgactaagtgaacctggaaaggaagaaattttggtcgcctaacatagaactcgttgtctttttctgtctttaaatgttatctcaaagacccaagagaaggggtagtttacctaagaaagaaatatgagctttgcttatggagtttcaggtatacctaatgtaagttaattaagcaaatacaatgtagcagccttgcatttggcctagcattcttttatgtttcctggctgtttcttcgaggagatgacctgcctgtcgggcagattagaatatttactgcagtgcatctttcatgcctcgctgtgactctgtaaccacggtggatgtgggaaagccattaaccatcagcttgacggtttacaaagaaataggaagttcaagttaagcagatatttaggatatagtttgccttccacatatttcaacctgtgttgctgcatactttttaagcttagcgtaattattcacacagctatgaattttagaagatgtttaaaagcaaaccacagtgacctgggaaaggagggaaacttactggagcgcttagccaggagcttaaaaagacattgctagtgagttttatgtcacatgaaatctacatttgataggtcattttggtaagtttttgttgttttaaatgactcctcttgacacagtaaccagtggtgctgggaacattcattcacattcattcatttaagctcatgactcaaataataacttagtcgtttcctctctgaaggtaggggaggtaatgaggagcaccgattaggctccaagatccgttctgagattcagataaggtgtcctaacaaaaggtttatggtgaaatgaaagagtgagaaaataattgtgctttttctagggtcatgcgtcaaatgaggctcaccaacttttaaaagactttacatagctttagataatcacattccctgccatgtaagcattgtgatgtaatggcatcatcatgctacttaacaattaatttatgcattttgtttaaacttcctttagaatatatatagtccatataaagaaaattccaggttcgttttggattttgtataaatagctcccatgtttacatgtgaaaaaaaattatttatgaaagaaaaacagagctttcaatatcctattttggttacgtctccataaaaactctaggaaacagtgggatcatctgtgaaacagtggaatcaccccaagaacaaactgtcagacagaccgtcctgtcgtggcatgacttgaacataaccgtcccacgtggggacgcattccgcaccggttgctggaactgacgggggctgcagtgctgaatacctctgggacgcttgggaactgtgcccctgtttacagacggcaagcccttagtggtagggccctgagattctgagaaacataaggtctgctttatttaatttcctctcgtttaccaagagtcacaacctattttagtaaataaattcaggaaattggtaaagcactttactccatccgttatgcctcggtcatcagcatggttgtcacggtctctctggctcacgggctgctgcggctcacagccttccctcacttgcctgcaaccagctgagagcctccctggtgatgggtgttactgagcttaaacgatgtaaacaaacagaacggcacacaagttgtgcagggaagtatatttcctctaccttgttaataaagatttctaactttagagattttctgtattgactctggcattctttccaaataattattttcaccccggggactacccacacaccctgggatagaataaaagaaattatctttcatttgagggtaccagcaacccgctctccagctctaatcctcttcatcctccttctttttttttttttttttttggttgttaaaacctgagctgctgccaagctgatcttaatagcatgttcacaaagacagatggatttttttcctaccttcattagccactgagtgttgttttccatgatgttctccagcacttgcagcctctgcaccgagtcatcgtattcgagcggcgcgtccctctgcacagcattggacacgtaggggctggaggaagagcggcagttgtccatctctggcaggaggaaagtgtagctgcaggacccatgctggacctgatattgcttctttcctatgctgtccatgctcttccgaaagttgttataggctgcggccaagacaagatcacagctcagagtaaagaaaacaatctgccacattctttcttcagtaataaaccagcagcttagcaaacttgagggcaaacacacgtccagagtcccgagctgctgccgtctaaaacgcagggctgctacgctgccatggctgggtccgtcaatgaaagtcttctctttcctctttttccagtagcaaacctggtttttactgctgtgttctctccaggcatgcagtaaactgtcagattgcagtgggaagaacagtcctgctcacttgggagggctgtgtcagcttttacagagcagctttcacggtcctttgttcctctctccccagatcctacagtgtcagtatccgaatcaatcactttcctttccttatatgataagttgataagagcagccagacatgtgtagtgggctgctccgccctcctggcttagccgttatcttcctgtagggggtcactagccaggcaacaggaaaaatcagagcagaatgcctgccctccaaccaggacccatgctgcagaaaccctctgggaaaaaccgatctgttacaggacccctgggcatttcctaggcaccaccccaattaagtatttcctagagagagcagttgatctcttttgtctgaaactgatttttgccgtgctaagctggcaaaatatctgaggtaataactttaatgttgaagtacaatgaaagttcctgttttttcctttaggaataaaaatattacaaataggtcaggacttcggtttatttttgttattacaaataaagaggaagaagtttggctcctgtaaacgtgtgccttttcagagggaaaaatagattcattgattttagttgattcttgaaccactagccaagttacaaaagattttcatttccgaacagttggatagaaagatctgttattaagtcacgttagaaacatcagtttctgagctctgacctttattctttaaaaaaactccacttggatattcactctaaaaatacactgtactgattaagttcattacattacaatagagaaattagaatttaagtgcctgtgtagaaagaggaatacaaactttttttttttttttttttttttgagacggagtctcgctctgtcgaccaggctagagtgcagtggggcaatgttggctcactgcaacctccgccttccgggttcaagtgattctcttgcctcaggctcctgagcagctgggattacaggcaaacgccaccacacccggctaatttttgtatttttagtagagacagggtttcaccatgttaggctggtctcaaactcatgaccttgtgatcgactcgcctttggcctcccaaagtgctgagattacaggtgtgagtcaccatgcctggcccacaaacttctttattgtgtcagaatttgttgacatctcagcattttgtaacacattatcaattacattagtcccccttggtattagactcgggcaagtcacttccctgttttaattaagctctaatgtcctcatctgtgcaattcaaggggtgcactcacaagatttttcaccttcaatcctatggctctgtaagttctgcaagtcacttcctttaacaactaaaacttaatacttcagagattaataatatgttaactcagcagcccaagtgtacatagggaaaaagccccctgcctttgctgcggtttatctctcaaggtacaaggtttattattcccagtgagcgctgaatagctggtacactgacttaacagaccacatctacccataaaagatctttattttttactaagctctaaccgaaagacagcctttcccttatcaatgaatagttaacgaacaacagtgtgaatatctgtgactttctcatcctcagaaatcagctctttttatttgctgccacaatactcagaactacatttttattaaacccagccctagatcttgctactgaacattggaataaagtagcatgtgtcttcttttgagaaggtgtttataggcttcaccagacaaccaaagggttctgtcacacagaaaagctggaagacatgctctggaaggatctcattagtagaagaggtagtatgattccaccaaggttctggacatggtttccactaagggaaccaattaaagatgctatacccatccggacagtgcaccgtcgaagaaagcatataggtcttaaagatgagacctgtgttagaaccctgcttctgtgtgacctccagcaaatgcttccattcttggagcctcagtctccctagtcataagatggagatcattttttctctgtagggtttttaggattaagatataattgtatgtttagaaatatttgttccttttctttacaggcatgctccattaaatggggatcagttcttccaccatcaaatagtataactctgctattctctgaatgcaaagcagtggcagtggcatagggtacaatttttttatttcctgtttgaaaaagcatattgtaaggtattaatatcacatatgtggttttaccttttttcaagattattttttgtagagacggggtctcactcttgttgcccaggctggtcttgaactcctggcatccaatgatcctcttgcttggcctcccaaagtgctgggatcacaggtgtgagccactgtacctggcctgcatatatggttttaaaagtcattcagttgtcttccaggcaaatagagtagtttaaaaggaacaaatagaaagagggcacaccacagtactttttgtctaccagccttgtgtcagacaccatgctatgcactggggatagagattaaggcaactgggtgtctgacctaaagaagctaatagtgtatggagagggagagacccataaacaaattggatgtggtaagagagagcagtcggagcacaaagaaagacagtgatgcttccgggtgcacaatatgccatgtgcagctggcatggactccatccttttcaaattccctcaagttccgaacatggaaggaacagctctttgtagattcctaaatggaaattatcggaaccagagagtcaggggaagctctagtagagccggagttggcaaactctgtccagtgtcagatggtaattattttcggctctgcaggctatacggccaccatcgccaccactcaaaggtaatgcggtgcaaagcagctgtgggacagcattaactgagtgagcgtgctgggctccaataaagctttattcgtgatactgaaatttgaatttcttgtaattttcacatcatgaaagattctattttctgcaatcatttaaaagtttaaaaaccattcttagctcataggctgttagaaaccgggcctggactgtagcttgctggcctctgagagcctaggtggtctgtgggggtaggaggtgctgggcaaggccgtccacagtgcacgcggtgtggtgaccgtgtgtggttggcaaggctgtcagcagtacacacagtgcagcaaccaccgtgtgtggtcagcaaggccatccacagtccacacagtgcaataaccgtgtgtggcgagcaaggctattgacactgtacgccgtgcagcgaccgtgtgtggtcagcaaggccatggagagtgcacacagtacagtgaccacctgtggtcggcatggccattaacagggcacacagcacggtgaccatgtgtgatcagcaaggccgtggatagtgcccgtggtgtggtatccatgtgtgatcggcaaggccatggatagtgcatgtggtgcggtgaccctgtgtgattggcaaggccatggatagtgaacgtggtgcggtgaccgtgtgtgatcggcaaggccatggatagtgcacgtgttgcggtgaccatgtgtgattggcatgaccatcgacagtgcttatggtgtggtgaccgtgtgtgatccgcaaggccatggatagtgagtgcacacggtgcggtgaccatgtgtgatcagcaaggccatggatagtacacgcggtgcggtgaccatgtgtgatcggcaaggccatggatagtgcacgcggtgcggtgaccgtgtgtgatcggcaaggccatggatagtacacgcggtgcggtgacggtgtgtgatcggcaaggccatagatagtgcacgcggtgcggtgaccatgtgtgatcggcaaggccatggatagtgcacgcggtgtggtgaccgtgtgtgatcggcaaggccatggatagtgcacgcggtgcggtgaccgtgtgtgatcggcaaggccatggatagtgcccgtggcgtggtgtccatgtatgatcagcaaggccatggatagtgcacgtggtgcggtgaccgtgtgtgatcggtaaggccatgatagagcatgcagtgcggtgaccgtgtgtgatccgcaaggtcatggatagtgtacacggtgcgatgaccatgtgtgatccgcaaggtcatggatagtgcacacggtgcggtgaccatgtttgatcggcaaggccatggatagtgcacacggtgcagtgaccaccgtgtgaacaggggaggactggtgcctcggctcagccttctgtgtggctgcttacaggggcttactaacgggatagaataggtgcttagagaaagtgccacactgaagtgaattaaggatgccaggtggggagaggggccaggaagtggcctgggatgcaagtgtgcatggatgggcgctcagctgtggcccctagggaagtggagacatggtctgccaggccactgaccaggaagcctcggggagccaatgggaggcccttgaaggcattaggtgcaaagcctggagttgtgggtgtccagtaacaccaccatgcagcctgggggtctgaggccacccatctgggaccccttcactctaaatgaggcttgactagggggatctcagaactccagagaaaatcttgggtgttcctccctgctgtactgacgggaccacaagaggcaagtgagactgtcagatgagaaacattattacaggttcccaaaatccacctgcctacccacccaatttttgtctgtaatagttctgctgaacagctgtgcatagtgcaatttatttccttaatactgtttgttttctcccccatattctgtgtcggcaactgacatttcagaggttcccatgtgttctctgtggaactgtctcaagttcttattaccctggttgacgacaccagaaaaaccatagctacctactcccagaaagaggccagtgttacaaagaatctcgtggccagcccttttggctcagtttgcccagttggaggccctaaggcgcaaacaagaaaagccaaagggcctcctgaggaccgtggaagtgggtggcgcgtggacccatcgctagctgaatgtggaatgtggacccatcgctagctgaatgtggaatgtggacccatcgctagctgaatgtggaaaaggacttatgacagtcagaccatcccaggttcccccagagcaatccgtgcagctctcataagcaaccagaaaccaaaaaaggatgctaagtcagcacaaagtggagcagccccccagctatgggttgccaaacagaatttgcttgtgggccccgtgacccctgctgttgtccagtttaatgctcagcatttatccagatcaagggatggaaatggggccaccagcctgacccaggcccggggtcgttttgcttttccaacctgtaccatcccagcaatgcattgccagcgtgcaatttgaaaaagccctgccgagctgaaaaacacatggaaagggctcagacacacttaaaggcacattgctgccctgcatttatacggcattttgtgctgacatcgttttccatcaggcctgggcagcccctcctgagactgtctcccgcctgccgtcctcagcacggcctgcccggctacagtctgctttcctcccactgcccctgcctgcaggccttggaggcggtgactgctgcagacttatttgggcagcctggccttaatttttggaaagtgccttgttgatgtatgaggaacttccacggctgaaacagtctaaaaaaatgaagctgggacactatgttttgatttgagccatttgcagacagaggggcacactcgggactcttgggcgcctggcacactaagctgggagggacttttgagacatcttggccatccaaatcagtcaacatgtttatatatacaatttaatgttcagtatacagggaaaaccattagaaggttagctgcacataaaactgttgttaaagttatttttattacttccccccacaaatcgtatgcaataattaataagaactagagaaatagccacaactggcacaacacctgcccctctgccaaaagaaaaaaatcttctttctgaaggcaggctccctatatagtgattcctttatatgcctcctggaagatctgtttcgactccattttgatatatgttgaaccagatttgaagacccacaaatgcagtctagagccattttgcaaaagtgttgctgcatcaaccatttccattccccagtgctgctcatcatgttacactagtgttaaatcctgactttggaatgcgaggaaggacagttccagccatgggatttcaaaaaagtaccaaaggaaagccccttcaagttaccgtaaagacagaagaaaaggaagaaaaatataaacacacacgtataaacatgtaaggtagctttggtccctataacagacaaggaaatcaaggctccgtgaagagagagacaagaattcccttagccaagtgcctgtgtgtgtctgtcttttatgttaatggttatgaatttaaggagaattgaaagcaataattttgcccctctttaacatggcaaatacagcctgctttagagatgatcagcaatcaccatttagtactggccgtcacctctgtgcagcacaaacacacatcccgagtgacagaagccatttcactgccagagactcttagcggccttcagttctcttgagctggagccactgggtcttgtatgaaagctcaccagacatctcatgtggacctcgggcatctgagccgggaccatcctattacaagtgcggaaaccagatcattaatgcagagctgaattcaaattgttacttgctagcttaggaaagaatccttggaaatccaacatattgtctaaatggatcagttaatcttactatgtgcattctacataccctttcattgtttgggcttaaataacttttctgctttgtctggtttaatttcatccaatgtggatcgctggaagaatatgatgtatgttttagaatagaaacagttctgagatgaagttgagcacaatttcctgttctagttgcaattaaatataaatatagcatttgacataaaatagctggcccgatatatttagagtacaagttaagtgtcatccccttagaattgggcattgactccgtagaattcccctttgtacaaggtgagcaaatgtatattttgttaaaaataagtatctgactgccaaaacggacagaaagctctttgccatatgtgttttcaggccatttcctttcctgggaaacagccatttcccccgcattatagttgtgttttcatttgcgggtagatagagtaagcgcaggagttaaaggacgcgggcctccacagccaaggccttatctgggacaattatctttctccttgcagctgtgtaacttctgtttgacacagaaccacagaaaccctgttagtgggaaggatcacagttaataggagaaaaatcttcattgttcatgagacttctcaggtgcttggcattcttatttaggtggcttaaaaaagttccaagtactcattcattctaacttatctgtgttcattgtgaaatcgtgtgtgaatgacatttggagcagatggattgttgtttttttttttttttttttttttaacaaacttaagagattcccgaatctttcacagtttgtactaccgcaaaccagcctaacatctgctaaagaatttcatattttaaagctgcactgtacatcatatggaaccttaaggactttgaagggaagagctttttatttactggtagcttgggaaatatccaagtaactattttttaagaaaaaaaaattccttgagtttttagaaatagtttatataactgttatgctgtttgatttttaaatattttcattctctagtattattatggaatattttatcttcccatcaaaaaaatgccagaaggtcaagatagaagtcacaacattaaaagggagtggatacaattgtaaaacaatagatgagtacatttgcctgataatatttttgccagtaattctgtgtcctgttttctccctgtagaatgaaatgctaaacatttttttcaatggattgatgtcagtgtttactaacatgacctgtgttaagtcaaataaagtatttcctttgacaaacaccatatttcattagtggctttgaggtgggcttatttgttataagtcacattaaatgttcccaaatccatttcataaatgttgtcgagatctcaaactccgttgcttctaaaaaaatatgtccagtctctttgtcataaccatcctaataaagatctaaatttcttagagtgaattttcatttgaaagtggcttaatgccagctagattaattcttgtttaatctaaatttataaaatttttatcttaattattgagaaacctttttaaaaagagataaaaatgtcatatgtgctatttacattaagatatattatctctcttggttataggttaagataaataaaattgcttatgtcaaagaagtaaaaaaaagtccatgacctccttttggtatccccatccatctggcggacttaatatgaaaaaatcttcctgtgggaaattaggcttgattatagagttacaagtacaaaaagtagtttttgaagaattataataaatagttacacataaaaggaagtgatgtttgcttgaagtatataaaaatattccttgtcactcttgtcccctcatgaatcttagttgtctgatgatggttcaagtctttcctaataatccagaatgtatccctccactttttctcttaaaaacgctatttcaagcattttctttggtaccccattaataataaagcatacttccccaaaatgttccatttcaagtaaggggtctaaaagtcaaagaccgactgatacaaaagagaaaagtaaattgtacaaagactgaagagaggatgcagtattaaacgtaccaagttcttgacatcggtttccctcaagaaaaaaaaaaaatgagtaacgttttttgaaagcctgaaactattctagtaaaatatttacggaaaaaataatatgcgctctcctcccaaatcctgatgcgcatttaaatcacctttttcatttatagatcaaaaatcttgcttgactacaataaaaattaaaaaatggtacctatttaagaatgcaagtatcaaatccacttgtaatactcactagctccctctgctgatctcctatcaagcgacaggcaaatctatccatgattgttattacaattgttaatggaaatgataggtaatttaggacctacatcaattgcaactaaaatacaagctacaatgctttcattttaattttaatgcaaaagcacatcacaccatatacagatgttaaagaccgacgtgcacacacacagtgaaaaaatatttttaggcattcatttagcatacatagacctaggagctgtctctgtatcctcaggtgataaggttactactattacaacagcagaaaaagaggtctgtactgtctgtctccataaggagccaatttagagacccagtcctgttcaccccaagcttacagtctaacgaggtgaacagatgtcccatctggatgcacaagcactgctgcctaaggccctgggtagtgcaggagggagcccccacacgggaagcctcccaaaccacgtaagggctacgtgaacagcaagaatagtttcactgtttatttagatccacactgttacttatttaagaagaacatactctgccctttctccctccctgaagaaagaccaaaactgagggaaattatattccaggctgagaaaattgcctgtgcacttaaaaaataaataaataaaaggcgagaccacggaagttaaaataaattaacaataattgagccaagagggaggagatgggtgagtcggagatgcggtctggaactagctgctgaagagtctgcttaggaattggggttgtaccctggacataaagcatttggggcgggggagtgtcctgatgtgactgagaaaggactgtggagtgctgtgtgcagaagggcttagaggaggtgtgagtagaggcagagagaccagagcagaagctgctacagtaattcaggttagatattatagtggcctgtgctagaatattaacatcaggctcatgatgttaaagaggggtgatcaataggccttctagatggatggaatacagggagtccaggaatgggattggtctggtactgggactgactcttacacttaaaaatgctaaaataaaataacttggcaatagtttttaaagcatctgtaaaatgacaagataataaacacatattctgctcaaacttatgtgaaggcaggaatcctgtgaactattaaagagctttgccatcaagtcatttgccaaacctggccaacttaagcctacttcaaggcctgagtggttcagacagaagacaaaggccaggacctaaagaaatgggagcatctgatgagatacctccttccaggaaggctctaccccagtgtcagggaagcagaagtaaacctgcccaccccactctccagagcagacaagaaaacatgcctggatgttaaacagaactaaaagaggggagcccatccctgagaatttaactacaagctcacccttttgggttttacagtacacataaggtggccagaaaaaaccacaatgaattgttctaaggtggtcccaggctgatcatcttattcccctaggtttgtggaagaagcaaatgaaaatcctttctgggagaatgcactttcatcatgggtctcaaaacattcttacaatttcccaagaataatgggcaactcacagacaaaaataaacacacaagaaaacatagtgctattagcaaaaatcagcagaaagaagaaatagtaaaaacagaccagccaaaaacatctatccctgctgtattggtttgctaaggctgcggtacaatgtgccacaaaccgggtgcctaaaacaatgggaatttattctcacagctctggaggctagaagtctgtaattgaggcatcagcagggccatgctccctctgaaacctatagggggtccttccctgtcccatcctagcttctggtgttgctggcctcatcgtctcatggtattctccctgtctacacggccgtctttttataaagatgcagtcacattggattaagagcccaccccactccaggaggacctcctctcaactagttaaacctgcagtgacgctacttccaaataagcccacatgctgagttgctgtggcttaggacttacatctttctatcaggaatgtaattctatccataacacttacgatgtttaaagatgaaagtaaaattttgaaaacacctaaaggggacagaaaactaaagaagaaaatcttgcagatttaaaatgaaaacttatagacatgaaaaatacgatggttggaatttataattcagagtcatgtttaacaagattagacacacctgaagctgaaagataagtgaaaacgagtcatcccaggtgtaggacagagagacgagataaggaccaggagagaaagtgaaggaagacctgcaggatggaggaagagtgtctgacaaagtccatccaaattccagaagaagggagagagaacagggcaggcaatatccagggagatagtcactgaagcttttcccaaagtgatgaaagatatcaagttacagattcgaaaaacggcaaaaaatgacaaacaggataaataaaatgatgagataaagcagtaagagggaagtcaagaattactggttctgcagtttctggcctggcagctgcacagataggattctcaagggctcggaaggggagagctagcagagaggcaatgcatgcagcttgcacacattcagtttaaattggctatgagacttccggttagagttttcctattgcatgtttgggtctgagctcaagagagccacctgggttggaagcagcaggaagacctattttcctgattaatctcaatgccagcctcattacacaatcttaactaatattaaacagtatatgaaacaggtgaagaagaacagctgtataaattgcataaagcttagcaatgtgggtttttctagacaaagttaagcagcaaagcagctccattatgagggacccttggccacggtttcacaggtgcaggttctgcagatcatggcatgttgtcctgttctctggattatggctctagaagagataatgataaagaagacccagggtggtcagtaaaaaggtcctacgtggtgtctatacaatgttgcaagtgactaaaaatgagtaaaacttacaagatataattagtagcatgcaactcttcataaatttgtcacttctttgaaggtccttgttatgagttgaattttgttctccgaaaattcatgttgaagtcctaaatgccctcagcacgtgaccgtcttcggaagtagggccattgcagttgtaatcagttaagatagggtcatactggagtggagtgggcccctaatctaatgtgacagatgtctttataagaggacggtcatgtgaagacagatacaggaggaacgcctcgtgacaacgcaggtagggacagggtgaagcttctacaaaacagggaacaccaaagatgagcagccactgccagcagttagcagagaggcctgggacagatcctgcctcgtggctttggcttccagaaggaaccaaccctgccccacaccttcacctcagatttctgctctccagaactgcgagagagtggatttctgtttaagcaagtttgtggtactttgttacaacaaccctagcaaactaatacagccttaaaaaaaaaaaaaaaaaaaagtaataggaaaggaattaaaatataacgctaccttgcagcctccaccaaacactgttgccatttggttcttctccttcttgttcaacctcaggagggggtgaaaaaagtccaggcagctcctggtgatagctatgcaaagcttcattctgcagcagtaaaagtgtttcctagaagtactaaggctcgttaattgcagccaccctataaaagaaggtcctctttcatgaagagcctgtttctctgcaggaagatggggctgacctcagggcctccagcacttaggcacttatccatatgtctgtaaccattgttgtgaggttagttgataatggctcattatcctcgctaaaatgaactcgttgaagtatgaggccaggccttattggaatccttccctttccctttcccttcccgtttccttttccctttcccttccccttccccttccccgtccctttagatgtagtctccctctgtcccccaggctggagtgcaatggtgcgatctcagttcactgcaatctccacctcccgggtcaagcgattcttctgcctcagccttctgagtagctgggattacaggtgcccgccaccacgctctgctaatttttgtatttttttttttttttttttttttttttttttttttttttttttttagtagagatgggttttcaccatattggtcagggtggtctcgaactcctgacctcaggtgatccgtccgcaggtgagccacccgcctcggcctcctaaagtgctgggagaggcacaggcgtcagccacagtgcctggcctactgtcttctctaaaatggcatctgtgcattcatctcagccgcccctgctcagataaaagcaatggcgcctcctttgaaatctgagagacgcagggccctgcccattctgcggaattccttctccctgctgcctgctgtgaggaggccccctttgccacggaacctgaaattcctgccactggaattacgctctggacaagcggcaagatactcctttcagtcccagccactgggttcctgctgcacaggaggccagggtgctgtgaacctgctctcagccccgggcaaagggaatctcgttaatccaggtggccagcgcctcttcctcagagcatctgcagtgctgcagacagggcctccctgcgtggggcttctgtcctccacactgtggtgctgctgggatgttttcatggggcctttcccttcccgtcaccacgtgtgctccagaacccggtgcatttggatgaagccactagatgtataggtcagcagctccacatagaatcaaattatcaaatgcacactacctgatccagaatagatcgtcctggggtaaacacattcacatattctgaatgtacaaatggctgtctagtaaacacactggaacttccataattattgtccttccagataatttttcaagattatatgcacgtattctgccattccttttcaagacaactttagaacttcctttggacagctactgtaagccaaagggcttgcatttgaatatcttgcatgaagctaaatctttgttcatgaaaggcagaataattttatatgccacaaagctgcagtagtgtgttaggtttagtagatggctaagcactacactgtattattctaatcctattttcacaatttaacaaatgtgagacaccgtgctacttgtacaagagatacaaattaaggaatcttcaatgaccttgtagcctagaaagacctttagtaattcttcttaatctccctacagagctaagtgatccagagctgaattaatccagaatttatgtcttcctccgcctccggagtagctctagaaaggtcaaacccttccgagatggagtgtctgtgggggtaggtcctctttgctgtgtgcgatcctgtgagacagcgggatgtcctgcatctctgaatttgaagcgaggagtttttctgctatgtttggggagagcctcactcccctgctcagtagatcagacgtgttctcttctttcaccacagctacaaacaacacactggcattgtttcccagacactcgactgtcccgatgggcatttggacatggtctatgagaggaataagctccagccactgtagtggctcatgggagagggaaatgggtagaaattctttcccaaactggtatttctagtaaagcactcagccagagcctgcagctgttcactattccatatcaattctaaacagcattttcgttggcaaaagaaaagtgagaaaacaacaaagcttgaagcctaaaactttgggaaacccctttcctgaatgtgtttacttagggcttaaaaatatgcctgttttcagaacagaagaactaatatccatgttttctatgccgatttttcagagtacattttaaatgtaagtacatttagtgattaaaagggaaaaatacttgatcattttctaaacataaccaaaatctcactatgtaattgttttttcctctatttaagagcagaatatttcattgctaccaaaatgctagtattttggagaaaatagaagaactagaataagtagtcagcaatacaaaaccctgcgtggaagatgtgtattttggataggtgtcaacatgtccaagctctcagtgacaaacacaggctcattacaggtctgagcaaatgtgccacttctcaggaagacaaggcagatcaatgtaaaggcaggtggcacctggtatggctcagactcgcacgtggttctccacagagctgctctcggctcctttggaagaggttcaacgttgggagcacaggttgcttctctggcccatgttattcctggagctactacttcccagggcagagttcatgtttttcgttcataaatggcctggaaatcctagcattgggccagccatccagaacagtggagctgcatgatctggtctggggatatttcaaagggaatagaatactgaggccctgtgggatggaggctgcttcccgatattgagaactgcaccagactgagctgtgtccagaggaagggagaacgtctttcattcacttaaaactcacctaacacctgacacctccatcttggcatcatccacctgtagcctctagccctcttcatctgttaagtgagagtaactggcaggttatttggagagtgaagtgacatcggcagagttccaggtatggtgtctgatgcgtgagttcgccccctttcccggtccccttctcctccatttgactaattatcaaagaaagattgctttagtgaatgagacagtttagatccattcccttgggaaattatggtggtcagccctccgctcggtctcacttttagataccagaaactatatgtccttgtgttggcagagctggattgtctgtcgccctctggtgcaatcctgcattagtaagggaagtgtttttctggggcgttctaatgaaaagtgcttaagcatttgttttggtgcccagataatgtgactgtagttagtatgtagtgtttggactttttgctcatgcttttgttgttgttgttgtcattgcagaaataaaattaaccccttaatcttatgcttaatgtacacaccaagtggtttgcatattatactgagaaaataaaaagattgttttagaaaaaccaaaggacaccaacagctctttacagccccaaagcacgtgtcgccagaggtcacaggaggggttcttagttatcagcaagggaaactgaggctttctcgtttatgcagaagtggaatttattgaataatattaagggggctatgtcgccaatgccacagtcacactgcccacacagaactggcctggcgaggtgttactttgaccaccattgctgggccaggacgctgccaccaaggccgtgcccctgccagaaactaaatgtggctgccccatccctggccctttctgtcagtagggtcaggttcaaactcctgggtagtcagcccagctctcattgactcagtctgaacagctgcctgttccctagaatccacatgcgctgggacaatgggaagtatcggtagacgctatggtgggaagatgactctgtgtccaccaaggttcttgggctggggaatggtctgagcatatgacggcctcagaccccagccaaccaaagggaaaggtctcccctgtactcacgaagcctccacgatgtccatcagcactttcttcctccgttgcagtgtaggtcagcccttcgcagatgctcacaattccctgatacagccggttgccctttgttgtgttaaactgaaagaatttcagagttggggccaggcatggtggttcatgcctgtaatcccagcactttgggaggccgaggcgggcagatcacgaggccaggagttcaagaccagcctggccaacatagtgaaaccccgtctctactaaaaatacaaaaattagctgggcatggtggcgtgttcctgtaattccagctactcgggaggctgaggcagaattgcttaaaccgggaggcagacgttgcagtgagctgtgatcatgccactgcactccagcctgggctacagagcaagactctatctcaaccacaaaaacaaaaacaaaacaaaacaaaaaaaaactcagagttggagaaggactcggacaaatgtcacattatagaggaggaaaaagacccaggaggcagaaagacttccctgagggccatgatggtagttagtgcatcccttaaatacaagtcttctgcttcctattcctgtaaataactttgcatttaacatttttgtacattaaacgttactgattcatagtcaatgattatggtcagccctccacatccgcaggttctgcatctgtaggttcaaccaatcgtggaccaaatatattcaagaaaatgaaataaaaatacaacaataaaaaagtacaaaaaatcgagtacaacaactatttacatagcatttacattgtattaactatcataagtaatctagggatgatttaaactatgtgggaagatgtgcctaggttatatgcaaatactccattttatataaagacttgagcatccatggattttgatatccaaggtgggggtcttggaaccccacaaataccaagggacaactgtgtattattttcataacccatttctgcctagtgttccattagtggaatgctaaccatgtgggaattatttatatcctactgttcaaggtcatcaccaaggtctgatttttcacacacacacagaattgcaacctccagcataaatggggatgaatttactactaacatgtagtttccatccacaaatccaatgtccctatgctatttgtaactgtggagccaagagaagctgttgaatcatgtggtgaatatgatcaagaactcaagattagggataaaagcaatcattctgttattcctttttaaaaattattagcctgtaatttaaacatcaggatctcatgtaatacagaacaatatcttctgacatttttacaatactagtattcttacaaaacacagttaggaagttacatgaagaaaacacgcagactgtgtgtggctaaatctttagtacctcatttccatagtcttagagaaagtttaaattatattgaaacttttctcaactgctatcttaatgtgttcaggctgctgtaacaacatatcattcaaactgggtgtcttataaacgatagaaatttatttctcacagttctggaggctgagaagtccaatatccaggcagattccatgtctggtgagggcctgtttcctggttcatagatggcgccttctctgcgtcctcacatggcagaaggggtgagggagctctctggggtcccttttataaggacactaatcccatttgtgaggattttcactctcatgacctgctcactttctaaaggcaccacctcccagtactcttgcattggggattaggcttcaacatgaatttgagggaggcgcaaacattcagaccatagccactggtcaacattaggtaacctgcagtgcttggctgtgggatgggaagcctgtgttgtaaaggacgtctgagtgggaacaggggtctcaagctgccttcacatctaacgtcagcacactagagatggacattgcagctgcaacctactgtgcctgtaaagcatttagaattacgccttgcatacacaaagtgctcaataaatgttaactgttattatggttgggcatcagccactttaattatctctttcaatcctcatagtaactcttcaacataggtagccttattttgcagttgaggaaactggagcttagcaaagtttagtgacgttgcagagctagagttcaaacccaagtctgactccaaagtgcatctatctgtgtatttgcttatttaacctcagacacacagaatcggattaattagagtccttgattcagcacacgttctcttcattgatccttactcctttattttattttttaatgctattttttgtttgtttgtatttaatagtaagataaacactgtgaactcaccacttacctctcaccatgagagcgctggtgcccacctccacctccgagttccacatatcccattaccctgccttccccgtccaaggaaaccactgtctggaatccttcgtcattcaagccttttcacagtatggctctttccagccttttatttctctactgtttcgcttggaaactctacatttctaagacagtgtggtgcctctgagctctgtggcttttgctcctgctagcctttcttcataaagtctttcagccccacaagtgtcgcagcttttcaaagcctttcccatcctttaaggtcctacttttcttttccatgaagtcttctctgggccacgatgactggggaatcctcactgtcttctgaagttctgcacgtacttactctgcacatagtcggcggtgaggtattcatcacattgaaatcgagttacatgtggtcctgttctatagtcaaccaaaactcctggggtaaaaatgctgcttttcatcttggcaatctctatcctaaccagcacagtgcctcgctgaatattagaggcctgagaattttctttgtttttttttcagagtgatttttttttctctgctttatttaatactttgaagcagcacacatttcagtttgctttatgcttgatttttttttatttcttctaaacaaacgagatacatgtgcagaacgtgcaggattgacacaaataatagctggcagagtgtcctaggaaagactcctcagatgttataaataatacacaaacaaaaacacacacaaatatttactgaagacttttcttgcgctgcaaggcactggctgtgtaatgcagaataaaaccgacaaaattcttgccatctgggatgtgcatgttatgtcagcacagggaagagatcaagtgtgtgtgcataggacatcaagaatacaataaaacaaagtggacaaaaggaagcgagggtggtgaacacaggacacctgaatgaaggacagagttgttggaaaaggacccctgagtgcccaagggaggagctggcctggagtagtgagggcaaggtgattgcaaatgaggccttggtgattggaaatgagctcatccccacgtcttataaatagttctccaagttatccgaggcaggttattctgtggcaaagacgcctcagctaactggatgcagaagagacaactgaatagagcctcatggtctcggagtctttttttttttttcctaggttattggtgttcatttcttgttttgtttttttttttaagacatatctttggcattttgtacctaccttctgttctaaattttgcatttttactactttcaagtgggtggactttgttgtggtgggtagttcaagattcatcatacaaatgtgattgtgcttcgaaactcccaccagtctgacgcacgcatgggttttctggcaacatttgccatctacagcactctctttgatcaccttcatcatcttccaacattcctgccacagtcacttcccagaaacttgctaatctgtaatagaaaccctcagattcctatggtgaatttgtaatcaaaagtcacatattgatttcaaaatcaatacacactttaaaaataacactacagatttagcagctcagggaggaaggaaaccgtaagttcatctggtgcagctacccgtctgggatgtgaattcctcctcttcatgaaatgtttacattcatatcacagtctagggtttagtgaaccataaaaagctgaaagttaatgcaaacagtagtcgcccccaaaacatataccaactgatttaaaaggagacacagcagatggagattattgtgaaaagaactcttactggccaatttttttgttattttaatctctgcttatcccaattcttttagctgcatatactgagacacttcacatctataataaacttggtaccagaacacaattcattccagacctaactcttttagatcattataaccgggggaggaaaaaagttaaaaaggcttatctatcttaagaagtatttctcagtgttcgctacacgtcacttaatcttttccaaaatttgacaatatacaaagcagtttgtagtgacttttcatagtgactctacaataaaatgggcctgtcctccttgcttttccaaatgcagtcatcatctgacaaggtttagctatttggggaagtccttgcttgcaaacgtagttcttttgccaaacaggtttggtcaaactgtgtcccctagttgcacagttaccccatatttgattaacaaatagcaaaacagagataatctcagaaatattcaagagtctcaaaccccaaataaaatataggcatcctcctgttgagtcgaattggcaattttgattagcaaggctcatgaagcagtagatatcccctctgatccccatcccagtgcgagggcacagtgagttgtattttctaagtataaactattctctagcagttcggctggagtattgggagcaaaactgtatttttctaatattttcagactaagacagtgtctctgttttccggacttttccgtggctaatgaaggatttatcagcaatacaaagaaagttctcccagtgggtactccacggggagaggagctggggtctcactagtgcacagccataaaagacaccacaagcatattacacgtgaagcaggatccgtgcccaccacagcagttgtcccaggagtttcctgtttgaatgagacactttgggtggatactgcagggagggagaagctgtgtgtggccaccacagctggaagcgtggcctggtgccctcacagctgtctgggagccccttcccgggaacgccggcttttcccgggtgcaccattgcagctggagccattgtcggccgcctcgaaaacatgcagttgggctgctctggcaggcttctccagccctcctcccaaggtttacctctctaaatgtcaaaagggagagaatactgtatttgtttttccctctactgaaatttatttgtgacatcaggcatcactttcaccttagtcattttggctggattcccatactcaattaaatatccttccttccatatggcccataggaagagagagaaattacatgtaactggtctttcctcctctttataaagtctggtggctgagcaacttggcctgtacttccttcatgacccaccatcccatgactgcagggcagttttaaacacagcagcttggtttctattgcacggaagctggccaacagtcacagtgtgcatttttctattgcacctccttgtgttaacccaagttcactcacagctgtaactacagaagtttttctgaaagcaagtgaagccatccttcttttattgagtttttgagctagggtctcactctgtcacccaggctggagtgcaatgatgtgaacatggctcactgcagccttgacctcctgggttcaagtgatccttgtacttcaacctcctgagtagctaggactgcaagcatgtgccaccatgcccacgctttctgatttttttttgtagagacagagtctctctatgttgcccaggctggtcttgaaccactgggctcaagtgatcctcctgcctcagcctcccggagtcctgggattacaggtgtgagccaccatgcccagctcatccttcctttaaaaccggcagctgggcaataatacagatgggaccaactaagtttctcagaccactcagggaagctagtcttgcatagacaaaatatacaccctcttacctgccccacctttaaggctggtccccagggtccgcgctctgtcctccagcctccacgcttccctgtgactagcctctgtggtcaaaggtgcttgctgatgcagcctctgtacagcctccatgcagtgcgtgtctttatgtggaggagaccgcccttctttcagcagttattgagcatctacccactctgtgccggtcatagggcttagaactgcatgtctggggggaattctgcaaagagagcctgaaataaaggcaaacagtgagagacggccaggagaaaccatgagcactgcagtgagtatcaagggacaaagctgaaaaaggaagactgaacgctgagcttcaagccattcatttctatgggccgcgggagcccttgaaagtctgtgggcaagttttggtgagattaagctggtagttctgttcaggacaggttgaagggatgagagattaggacacttaccacctgaatcctgtcgctggctttagtttaaaccacccgtaatgtagacatcctgacttagaattccctgtgctgcttcctttctgatggaaacagctctgctaacagagtgcaggctgtgggagccgagccccgttgcaggcagcctgcaggccgcagtttcctcggcttaccacccagcgcttttcattcggctcagcgctagggacctctgcttccacttctcggtgttggaaattgccatttatttttgctgtcgatgatctgtattgacttggcctgagtatgcgtgcacgtctctggtggtctgaattatatagaccagaagggtgtctgatgccgcttttataaaaaataataataatttgaaaggaaaaatgactcactgaagtctggcaaatacagagccctctctctgaatcgacttctcacttggccatgttgaattccaactgggtgtcctcagacatttctatcccaagatctactcctggcttagaatctgttttgttttgtcttatttcagctcatggttcttgttcccccagctttatggggtataatttccatacaatagaattcaacactttcaatgtgtggttggatggcttttggcaattgtatacagttttgcgatcacccctacactgaagatatagaacactgtttctcgtctggtgattgctggacattgaattctttccagttttcactgttatgaatctgactatgatttttggcatggatttgtatgtagctataaatcacttggtaatttttcagaagaatagcagtcttggggcctggatggcttattgtggtctcaaaaagttcctgatgataaggttgcagcctcatgcttctttataagaatgcagtattacttgcaagggagcttgggtagataagaaagcaagaaagtccatgtggagaccctgtccagagagcacagacatggactaagttaaaggatggtaaattagcaatgcccaaaagcacatggaggagatacttcccctcctgactctattggtgatgcagtttatttgtctgagctatctgagcaagtttcctctcacttacgtgctggggacagcagattccaatgcagagtccttagagctcaggctcccctcaacctgacgcatctctcaaccatttgtcttaagctgtctgaagtcagcttcccatcttggggaggtagaagtgaaagggtttccactttgccaagtgagcgtatatggggagactgagggtgtggagttgatgatggttgtggggtggctgacagtgtccacagggctagtcttgaggcaggctgacactggggccagatgggaccactgtgcctcctgtcccctccaccttctcctagtccaggaagggaatagcagcagctgctctcagtggggcattctttttccagagccaggccagcccagcagtgatcccttgataaagcaagtcaccgttatcagagcaagaactatacattcacttaaaacttttttttttttttaagtgtaaaatgggactgcaacaaaaagaaaattgtgcttaggagaatgtccctcagaaaatgtactttatgattgcgaggaatatttgccaaggtctttggggtaggctgagccccttcacctccctggggacatgctaggatggcaagagaggatcagacatctcccagggaggctgtgtccagccgggctcctggagtggcgtaagtctggttgaaccagcactgaactgcctgagtccatgtgaacgcattgaactgttaaaccgtgtctctggcggccacatctccgggcttcacccgctgctctcccctgtcctgcaggtacaaagtcaatagtcaacctcagttttgaatgttacaaaattattagcctctccatagttcttcccatggcttctcacccaagccttctgctcctctctcctctctgcccaggtctcaccagctgcccttgggccaggtcactgcagtgtctgccagcaccacgacaggcaggctggaggcccagttctcacagaaaagactcgaaagggggctttccatcctttatagtctacctgctacttataggccaccaggacaaaggatcaaggtggcaaggcagaaattgcagcacagagcgaatggaaaggcagtcactgaagggattcttttgcttttacaagtagatttttcttaaacaatcactgtatgaaaacaaaagtacaaaattattaaaacacctggatgatgaattgacaacaagagtttttctggaacatcctcctgtgggctcggggaagacagtttttttctgtggtgatagatggtcaggaaatgtagtgacatagaagtgaaggcattttacagagctcaccttaatcaatggctttttcacttattaagttttcttttattttttccttcttcaaaaatgactgataccttaatttatgggaattgtttccagtaaaaattgggacaatgatagtgagtggagaatatttatatgctatacttcctgtcttccttcatcttttattactgaggatattgacatgaaaacaggatctttgtatccaatgagttcatcgacggccgatttcccaccagaaattccaggctttctgacatcagcgtgcattgctctgcatgtcacttggagcaccggcatctggaaatgatgaaatcctgaacaacaaagtttgttttcaggaagacaaggcagtggggaagggaagggtgctaagcttcagtgactgcctactgtgtgccaggcattttcatcttccatctcgatagaatgtctaactgtgctctgagatgagaactataaatagctggtcagccaaaagttttctgctttttcttagtgatctcaagtgtttccatgacacgtgctgcaaccaaatacattatgtgtaaattgccaaagacctgttgatttccaaaccattatatagtcatgggaatgcttgtatacctgaattgtcataaaattgatgagatgcgaagatacagcagaatatatcagataattctgcagaactcttattatggaaatgaaaataattcaatagagaagtctcgattcataaaagactagttttactctaaagtatctaaaagacatgcattaaaaagacatggcactgtccccgaaacgatcttgctgtgttgcatttcaaatggtaccttcattttgaaactttgcacattagcacgttctttataatagcaaaaagtgggggagtgaggaacatttggtgccggaagaatgattaggtaaagcacaccaagctgaaaaaagtatttttgcagagcgttttcaagagcatggaagagtgttataatgttaagtgaacaacaaaaaaaaaaaaatacagatccaactatgtaatcattacacatagaaataaaaatgagcaataaagccaggatgtcagtgaggatggagtggagggaatgtcctaaatgtgcgttggcccatcatcacctcatgcatgaagtgaatggaaacatttggtttatgttttctggaatgtctcataagccattgtaaccaaaaactacaccatgaacaaaaagcaaagcaggccctgcaggccctgggtgggaagctgaggaggttggcagtttctcaaactcatgtcagatgcccctcggccactagacagaatctgctgctatctgggttctggttgaccagaggcctaatctggaatctggttctaaaaaccaatttttgttatagggcttgctggatacaaatctgcaatgagacattgtcacaagcaatagcttaagaaaaacataaaggaaaaaataataataagtttttggaaataagcctggaaaagcagtttattgccatctgctaactcatttgattcttgcagtaaccctagggtaggtatgatggtgatctctgcttcaaagatgagaaaatcgaggctgcctcaggtcacttgacctcctcacaggccagtggagactggcttcagactcgggcctttggacctcaaggccctggtcttcttttgttgtttgtttgtttttgtttttgtttgtttgttttcctgagatggaattttgctcttgttgcccaggctggagtccaatggcgcaatctcggctcactgcaacctccgcttcctgggctcaagtaattctgcctcagcctcccgagtagctgggattgcaagcatgtgccaccacacccggttaattgtgtatttttagtagagacgggtttctccatgttggtcaggctgttctcaaactcctgacctcaggtgatcagcccgccttggcctcccaacgtgctgggattacaggcgtgagccaccacgaccggccaaggccttggtcttcctatcgcattttgacaccttgctcagtacgatgagtagttaaaatcactgtcattggctacatgcctactttttatagtcactctacttattgtggttttggctacatcctagttgaactctagggctagtgtttattaaggtcttgatctcatatggcatttgtagacaatcgaatgttgagtgataagccctggtaacgtgatttctcactgctggcccgtgaagccatggaaatgttcccatggaaatcaccccatgtgtggaatgaatggtcagtggaacataggcatctttctctcctgtcctctaggttttaaaatacctgaatgtcctgaaatgcaagagtatcctaagagcactttagaaatatctttgcggtttctttctggtgtgctttgtgggttgggtgaggtaccgtattccaggacacgtggcccttagagaaacaaataatttcctttcctcctgcttcagtgttattggtaaagtgggaaggtagccccaagacactcagctcctgcactgcatttggatagaagggcgttcaaattccaccagggacaacttcgtctaaccccctagaattcctcattttgacccttggcatactctatatttgttgaaatacaaaaaaaggagttgaaagtgagtctatctatatgtagtaggtatatcgtgttcactgtaaaattccttactgtatgtttaaaatttttcagaatacaatgctgggggaaacctatggaacagaagtagggaaaaaattcgacaacgcaaagtgagagtgggaaaccatgtgaagctctgttagagtatcatcactaatctcttttttccttatacctatattcatgaaagcaaatagagaacaatacaatatagtgtaacaccgtgtacccatcactcagcattgctcaatcttagttatcattatggttattattattattattatttgagacaggaccttgttctgtcacccaaactggagtgcaatggggtgatcctggctcactgcagctcaacctctcgggctcaagtgatcctcccacctcagcctcccaagtagctgggactacacgtgcgtgccaccacacccggctaattatttttggtagagacagggttttgccatgttgctcagggaggtctcaaactcctggactcaagcaatcctcccaccttggccaattttaatattttattatagttgtttccattttttgtgtttttcataaattaaatcttgtaactattatatatttcacagaatattataaagttaaagctccctttgcatctttccctctccaattccattcttcctctctctctaaaagtaactgctgtcctgaatttaacgatgatttttaaagtcatctaggctctcgtttttctttcttttttttgttttttttttttttttttttgttgctgttgttgtttgtttgttttaattgagaaggggtctcactctgtcacccaggctgaagtgcagtggcgctctgtgggctcactgcaacctctgcctcccaggctgaagtgatcctccaacctcagcctcctgggtagcagggaccacaagcacgtgccaccacacctggcaattttttttttttttttttgtatttttggtgaagacgaggtcttgccatgttgctcaggctggtctcaaactcctgagctcaagtgatttgcctgccttgtcctcccaaagtgctgggattacaggcgtgagccaccgtgccaggccggctcttgtttttctcttccccctacaccccaaataaacacagagctttattcctgcctcagtcaaattgctgcttcaaggccgcagtttggacactatgttttttagggtgtggttttttttttttttttttttagacagagtttcgctcttgttgcccaggctgcagtgcaatggcacaatcttggctcactgcaacctctacctcccgggttcaagtgattctcgtgcctcagccttccaagtagctgggattacaggcatgtgctaccatgcccggctaattttgtctttttaatagagatgggatttctccatgttagtcaggctggtctcaaactcctgacctcagatgatccgcccacctcggcctcccaacctgctgggaatataggcataagccaccaaactcaacttataatttatgattaaggctgcagtgcaatggcgcgatcttggctccctgcaacctctgcctcccaggttcaagtgattctcctgcctcagccttccaagtagctggaaatataggcacacgccaccacgcctggctaattttgtatttttaataaagatagcatttaattatgttgtccaggctagtcccagactcctgacctcaggtgatccacccacctcggcctcccaaagtgttgggattataggtgtgaacccctacagctgacccagacaccatgtttttatggctggattttgtctttgctctggttgcggtcttaggcacccttataaatagagctttgaagagaacattaccaatgtatttttaatgaggtcatgttataaaattgtcgcataggacttctcaagaaaagacagcctcttccttgcaagatactttcttttgcaaagattgagatcattccacaacaatagacctctgttcattgcttccttcttatgcaaaagtggccgtccctcccatcagaaggacccccgctggcactctgtcaggtagacagaagcatggatagaaggctggtggtgagctccaggtgccttccctattgtctcttctctcctataacctcgtataaccttcctgggttttcctgggtgcatgtttttttgttgtcattggtgttttgacagctggctgtccaggcaaggctgctgtgtttgagcagaggtttgctgagttgagcaggggtgtggctgcagggcctagcctggcctcccaggagcccccgctccccgtgtgcccaggtcatacccaaacaggagcattccttatgctggtcctggacagcgtttctattaaagggttctttgtgttaggaatgttcagcagagcgccatgagccgggtgagagtggaatgagtggtttacccagggcacctctggaccctgggagtcacagctgtggaattttactggagttttcactgcagtgcagcccagggtaggacacagagggcttccactcccttggagcatgctaatctttccaaaacactcattcgtgggccctcatagaagctcctagggcattaccaagaaatagcagtccttgatcatatccagtgaattctgaaacagtgaaggaatttagatctcatgtgtccatgttgctgagggcgtcctgggcacagagcctgctcgcatcaggccagattgtttggagtattgccaactggccttttttctggagaagaaagtactgacgctacgaagacttcagtgttctcctgcaggggactgcaggggactgcaggggactgcaggggactgcaggggaagggaggattggcctgtcacttgccatctctcatttctgcgatgctacagagagggaaggggaggcatacatatgtcagaatctaaattacagcatgtggaaagacctgccctcggggtcagagcacaccaggctggggaggacctagtttaaagggatagaagagacattactttagctccttctcttcaggggctccataatggttttaaactgttctttaaaatcgaagtttttctaatctacttttgacttatgtattaaccaagaacctcttgtaaatcttaagactatatagttgtcaaagacaggcaacttgaggttgagtctgttgctaactaacttactgacttcgcacaaatcactttgtctttgggaacctcgctcccctatcagtaaaacagagatgattgattgattcaaaagcattcactgagcacccactcagctgcgaggcactgcctgcatacttgggatatgtcagggagtgagagaggcaaggatccctgtccacatggagacttcattccagcagaggagacacacaggaatgagtgaatggaataagcaaatagggtatgtactgtaggagcaaacaagggatagaaacatgggagatgggtcaggagtgtggactcgagtccacagcgctaaactgtcccattgagaaggtgaatgagttaaaagagatcaggaagttggccaagtagatgcaggggaaaagtgttccctggagagggagctggccagctgcatgcacaaggcctgatggacggctgagccagtggggaagaggaggcagcagcacagtcgggatgaactggcaggtgggcttctgctccagaagagatgcgggagccctgcaggtttgagtgaagagtgcatggtccaacacggtcttcagagcatcgttccagctgctgcaggtttgagtgaagagtgcactgtccaacaaggtcttcagagcatcattccatctgctgcaggtttgagtgaagagtgcactgtccaacaaggtcttcagagcatcattccggctgctgcacagggaagagcatcaggggcaagagttgatgcagacagtaatagatggtaatagagtcagatacaattgggcaggcaacggccctttacagatgacgaagcatcagaaaagttagggtgcaaccatttgttttcagtttacaaaaagggaagacgattaatccccaaaaaggagcctgtgagcgtcagatgaagaatttaagaaatgaataatatgggtcacatgagacagtctctttctttttattcatttatttatttttacaaaaaagtatgtttctgtgtccttcagcacagtttgcaggagcatttagagcacacccgtggagtggcccttttatgcttgccaagcatgctgaacaccgtaagccacgtgtgacacatcttccatggacatgaaagatatgttgatcattttattgggctccagtctcagctctgccacgaactggcactgtgccttggaccaagtcacttcatccctttgggtttgcgtttgctcccctggaaggtaggggaggggtgcagtgagctctggcgttcttcttagactctgctgcagctgcatgagtgggtctatggcacagccccctgcctgcatcatggcaggttatacacagtaaagagatgaaaggaatttttctgctaagggaagtagccccatctgtcaggatagttggctccattgtgtctaacgtaggtatcttataagcctgtacacatggcagccaaggggacctggccgccagagccgtaggagatgacccagcacaatgggctgggcagtaaggaagccagactctggagccagcgtggaggtgcaggagctcgtgagtatgagggcatgatgaggggtgcacagaggaacccctgggctaacaggggcccaggagacagtattacggcattgggctttgtattgccggagaccagcacagatcccacaatgcaacgatgccaaaaaacggtagaactgaaaaccccagccagatcaacgcgagaataaatctcttttctgctgaaattgatagcctcctaaaatgctaagacacatgcagcggagaataatcattattgaccatgaaatagctaagaaccagctgagaaaatacagaaggacacacagtaagaatgaatgagaaaactcttgtatagaggatacggtcagagttagcaaccagttgcttcttcatgtaaattaaatcagcggagaatctaaaaccatcccgtagaccacatttagagggtaggaaggatgcaatggggccaggtgggcaggagatgggcttagcatccaagcaggctggactcacagccctctgcctggtgtgtgatctcagcacttcttgtaccttatctaagcctcaatgaaggtaataaaatcacctgcctataagcctgcagtgagaattagaggagcaaatggatgagcctcagtcctgtgtggggtctggctgctcacaaggcaccatggacgccgtctttaccatcatcactgtcgacccggagccaatggtgaaagcaggacacaggcaagccccagcgtttcccaccattgtcttattttttcggcttcaggaagacattagacttctaggaagagattccttaaagccaggactagaaggtagactccagattttggctacaagtggcaaatatgtcttgtaagatgaattttatgtacttgtgccaagtgccattggaaataccgaagactgtgcaaaaataaaagacaacaaacagccccaggaacccggagccctctcccagcccagaacattcaccagctcggccaagagttctgctgggttttctctgggggctggtgctgctgtggacacgacaacccggaacacggagggagggctcagcgctaggaagggagagggaatgaagaggagtttccctctctttgctaatttcttcgtctctgggaacatttccttcaacagagtcctgcttttctcatcctcacacctcactgcgcccctcctgaacccactcctttctgaatatggtctactgtccttccgtgacccacatcaccttggtcctctccctcataagcacatcctaggtgggcctgcccttcacttacccatctccttagaagaaacgtgagctctccaaagggaagggcagaaccctgcttgttggtctttctgcccccagcacttgacctagagccttgcactgaggacgtgccactcatgtctgctgaataaacagccacatttccagatgacgatgtccttttccagccaacatcagctcagcgggccttcacgtatttagttatacttgtgcctccgctcaacagggtgaggatgctcctggacacagaaattagctctgaggcaggaaggaggaaaggggatgcttctgggaggcaaaggcggtcaatcagagtgagcaccagagactccgtgtacctgggaaatacgtgggttcccacaccagccttggggagccagggtggggaagagggtctgtagagcaagtttaggatgcagcacatgccaagcttttcagagtctcacagtcaggaacagaactcatgcagggaggggagggattggaaagtaggaggcaaagcagaagccccgaacccaaagacagagccggcgaccggccagagtgcagctctgagcctcagacatgaggggagaagaaggggatggggtggggggcggtcgtgaggaatgtcgttgtccaggctccacccggcccaccagctccgcagaggaaggagtgggctgggagaggcacacaccagaacagctctcctcggggcaaagcaggctttcttcccgaacacccaaggctttccaaaaggtaaacaccatttcccccaagcgaccccaatgtttgctgaagcaaaacctctcgtgtgagccggcgggcggcttcacgacaggcgtgagaaggccatggccctgtgtgggtgaggaagcgcagtgcggctcccccctgcgtggtgggactaagaagagccccctgccacccgaaaggcgccctaacacttcagagagcggatggctgccgagggtggccaggctggagctgcggcttcccgcccgatgcattgcagaatgtaactttccaaaatgcattgctctcatctcagctcagcgtgaaaacacatgtgtgcacacacgcacatgcagccccgctgagctgggtggtgaaaagaccctaattagttctgattccttaaggcatgtattttaaaaagcgtgaaacctattgagatgctacttcctagcgcgaatacggggctcttaaaagtcctgataaaagtgaaaatccgaggcgcgcctgggaagtgggaatgttccctccaactcaggcttccacggtcatgagtaggaagtcctcttcctaatctcagtatcttaaaaagaagccttgatgttgttacgtgattacctaaaaggaatgccttcctccgcggaccggaaggatatttttaaaggaatgtgaagcttgtgacaggaattatcgatacctttggaatttttttttccaagtgactcaggcttacttgaagccattacctcggagttagtcagggactgcatgacgccaggccccaactgtttaaagcagagcgcggcttagtgaaagaatgaaaaaaccgaggatgttctttgtccattattctcaccgtgatgaatgatgcttgttttcctctccactttaattagaatgtttctacatttgccaaagaaaatgttggaatggagacaaaaacctgaaattataggaacagggcttgatgtaatagcttatttgtaaaggaaacacaacttgtttggcattttattgaaacaggaagttcagaagcttagtacacacaagtacaacaaattctcaggtgcttgttgagtcatctgttgttggaaatagtctcctggtagttttccccttgatttactttttatcttcattttgtttttttgaaagtagtgagggtaggaagttacagagagattcaattagagattatgtgtatttttaaaaatcagctatcaagattaaataaagcaagcgggaattctctccttgctcccatataccaatttttgtaattatgtacaagatgagggaaaccaaagaaaaacaataacttgcttcaatgcaattactaattcaaaagtaaccattactctggggaattgtattagagattaacaaagaggaaaagtactgtggttttctttctctatgttctatttgctaggaagcggtcaataaagtaaccttttccccacaggagctggttaatagttcgcttcatgctaaataaaagttacagaaatatctggagctgagttgctggagacacagaaatcttcaggttggaatttcttgtccttttccaaaggattaggccaggacattgctgtcaaatctgcaaaacctactcatcctggcaagagtgcggtatttttaagactcactagtgtgctacttctaatagtgcttagtcagggacccccaggggagtgcaagggagagagggtccccagcagggatgccagaccttctctagctggccgtgggtgctggcctggccacctgtagccctcagcgcacaggtggaggtgtaactggtattcctgtgggagtgacagtgtccatctttgacatttaagagcctgctccttcagatacatttaccattgccaccactggggattggggcggcactggccacccttggcggcacatctccagcttacagcagagtctgagtgtctctagcatacctctgactgaggcacgttaggcttgtgacatcacatcttcctaggtggggcagggactttacaatacatgtgacaagagaaaaaccttacagctttgtattgaaagatttcttaagtttttagtttattgactaaataacactgaacaaaacgattctactatgaaacgaaaggattggacctctgtgagggttgtggcaatgtttcaatagctgagcaacgcaggaggcacacaggccatcgttgggggcaggttggaggccttcagttcctttacagctatgggctcccatcaagggtgagtgcattgaggagacattgcctagaactactggacagacatctcacccaggagacgggagcatggtacttaacacacttccatgcaccgttcagaatcgctaaacacagcagtgcagaggcagatgacaagggccattacggggtcaccaagggaggaaatagggactggagcccccaggaaggagagctgaggctccctgtgggctgggggctggctttgtggccctgcagccagcacctggagatgagagacctgtccctaggcctccctgcagccaccacctggagacagagtccatagacctcccagctgtgcccacctgggcagctgcactttccagaggattattcctgcagcttccaccctcacagctctcagctgtctttgcaggtgcatctctggaaaacagttctcatcagggcaccctgtgcttcccagtttctagtcatttcccttctctgaaggttctagttcagactcttgagcaaagccttcaagacctctccttaaactgccctcctcctcttccgtccagccacctggttgcctcctggctcttcctgccctaataccggctgcccgtacgggactgctcacctcctgcagggagccggacgtctgtggcgatctccctcccgccatgacaccccctacctgtcctccatcatatgggacacacacacacacacacacacacccctacgcacacccacaccccacatgcacatcatacatgcccaccagaaatacacacaccatacacaccacccacccacatgcacaccatacatacacatacacacaacacagacattaaatacacatgccactacacacagtgcataccacacacaacacacaccacacacacacacccaatcacataccacatatacccacaccacacacacacacacacccaatcacgtaccacatatacccacaccacacacacacaagcctttcctaattatctaaaggagaagcttttctggaaagcattccccagagcttctagagaaattagtgtcaccctcttttatggtttcatagtaatgtttttatatcaccagtataaatactatcatataaaaagggtaatcagtgtaccatagtaattaattctttaagtatgtctcttctgctagatgatgagcttcctgaatgcaggctctgaagaattttttcatagctttaaatccactgcatggaatagagaaggctctccataaacttcctgagtttaaatggaatcggattggaaggcagtagcaaggcacaaagtgcagtgagagccaagctcaggaaaaccagtgtccttgagcagaaagacttaggaagggtgctcgctagcgaggagggaggcaacaaggggccagcccgtggggagccttaagcaccaagagcagggcggtgcacactttgtctggcacgggctggagcaggagagggaccgtccttgcattctgtgcggatttctatggcaatgacatggagggaaatgaaggtaggatcaagagtcccactgggaagtggcctggcaaccagaggtgtccgcaggacacctgagcctcagcagtgtctgtgaggataggagggaaagccagaccccagcctctctggggagaatctggatgcatgcgggaggaatggatggaagggagggtgtggggctgagtggcggcggctgggctgtgctctcccactcagagagccttccccaaagcggggaaggctgcttgccttttggttcatttcctttctttaatacacagcaaattcctggtcaccctttgttgttggctggttgggtttgttgctttccttgttgtttacaagctccaggtatttgtgacagatcttatcatctccttccctcttagtcacctcttggcccaactctgcatattttactctttttaactctgctcctgttctgacctccccactctcggaagcatatttgcttggtgttttcagattttatttcattttggctatttaaagagatgcaataaactaaatatggcctggcaagtctggtcttaaaatagaaaatatatatatatgtatatttgtgtgtgcatgtgtgtctgtgtacataggcgcatgtgtgtgcccttgagtgtgcatccgtgtgtgtgtgtgtggccggtgtactataaacccagggcatcagtctcctgacgtcattgcttgcactttttgccattctcccccaaacactagttttcagcctgtattttctcagtttccccaaaaatgattttttaagaaaagtcaaatcagaaagtgatcagcctctaccgccggactctgctttagtatccatccatgtctctgaggtcttggggctcataggaatgtgcttattttcatagtcccattaacatgaatagtttcagaagggccagctcagttttgtcttcagttttctcactggtgattgtgcaggggtggaatggcaatggaatgcataggggcatgagtgaacttttcgggatgacggaagtactctatattttgattgaggtgttattacttcaatgtgtcaaaatcatcaaaatttttacatttcatcattcttaaattatacctcagtaaagttgattttaaaagttaaacacataccctttgctcgaaaatgatcctgtagagcgtttatgcctttatatgaatttagctaatgcattctctccccagggccatttgcattttaggatataactgataatgtggaaggtactagcaaggaagtatgggatgggaatctggggatggaagtaccttcctgctttcagtaagttacataggcactccttattcataaggctgagcttggtttcagataaataatcagaaagtaggttgtgcaaggttttaagaagaggatccaaactgggacttagtaacaaactctgaaactgccacttgcattctctgaacttcacatcaagtcaatactctgtatgctacaattccatcttacattaaaaagcaggtctactaagggacccgattcccaagaaataaatgtgctttttacaatgcttgatttgcaagtcagtttcaaaaataatttggtgaagatatcagagttatttttacaagattaaaaatcagtattcaacaaattattttattcactttgactttttttttttttaacctgtctgtgacatatgtctcctttgatccgcacacacaccctggccagtaggaaacaggcacactctgctggtggcctctggatggggactggagcctgatcttggaccttccctgtctcatctagctcagcccccatgctgtcataggccgcagccaagtggccttccaggtttgcactggaaggagccacagcccctccatggagccatcccagacacagcttctccacggagccctgttctcagccctggaggccggcaatgtgcttcacccactgcctgccacattccagccaacagaagaacttttgaccgagaagtagaaactaggtgattcagatcagatctctgttgtagactccactaccctaatgatgaatttttaaaattaaacattccctaacaaacctccaagactctttgcttgggtcggtcaaaatacagtggaatgtgagagcacatgtcagaattctccagcctacgtttgctgttgttgttgttttgagacggagtctcactctatcgcccaggctggagtgcagtggcgcaaactcggctcactgcaatctctgcctttcaggctcgagtgattctcctgcctcagcctcctaagtagctaggactatacgtgcgtgccaccacgcctggctagtttttgtatttgtagtagagacagggtttcaccatgttggccagactggtctcgaattcctgacctcaggggatctgcctgcctcggcctcccaaagtgctgggattacaggtgtgagacaccacatccagcccagcctacttttatactatgaacaaaacttcttagaattaccaacttaagtacaatagaagcttttgaaattagctggggggaaattgagtctctaagtaaggaggagtaagagcaagaagatcagaaggaaccacagaatcaaacactttcaaaaggaaagaaaattaggaaattgttcggtgccatcccttcatttcagaggggaagaactaaggactagagaagtcaggtcaccccgacaggaccctatgtccctccttgtcgcctgacctctccctgtgagtctcagtggtcctggtcccacagcaggtgcttggggacccagaaagaggccaggtctcctgacacccagccccgctcttgttgggtccctgaatctggaatggttactcatgttgggggaattttatattcttttttccaaaagttgatatccagctagaatctgtccttcctgagagcttgtcactgccctttctctcctccctgcctgtactcctgttcgcttgggactcacactccttgcaaaaaagcttgtttcacccaggggtgagttttgtaactagagcagggagtccttgcctttcattccaatgcattccccaaaagcagaaaagtgttatgcgatgggagtttgcattttggaccaaagactccgcagcaaataaatcatggaaacgaacaatatgtccttaaaccaagatgtaactgtaaacctctactgtcttatgaaataacaatactgtgctttgagtagccagaccacatagtagctggactctagactctaagcagggatgaagtcagtggctgctgatctgggccttccccagaaggatgccaagagatcaagttttgtttttaagttctgtgaatcacagacattatttttgtaatctttttttttatgacacagagtctcactctgtcacccaggctggagtgcagtggcacgatctcagctcactgcaacctccacctcccaggttcaagcaattctcgtgcctcagactcccaagtagctgggattacaggtgtttgccaccatgcccaactaatttttgtatttttagtaaagatgggtttctccatgttggccaggctggtctcgaatgcctgacctcaagtgatctaccccccttggccccccagaatgctgggattacaggcatgagccaccatgcctggctttgtaaaaaatttttaaagccaatttgcttgtttaaaaaactgaatccacactggtaagttttgttttaataaaaaaattgtgagtaagttgtaaagcttttgataagttcagtggctcctgtaggcagacaataaattgctaagtcccaaagtgttgcaagattctggagagtactttgttcatactttgaagaatatgcctgattataaggcaacacaaattactgaagccttgaaatgatgaggttgtttccatttactcgcacataaaataatatatctaaaacatctagcaactctcaaaagaagagagtaaaaagcttttgagaaatcaaatacaattcattccaattcaacttgaaaattcccaacagtccgtgttgcattttatacatcttgaaccaaaccatggctttgagtaaaggcttcatttaaaaacctaacctatatatggtgggtgttcatgttctattaaagcaaggtccctgtcctagttggagggaacttccctaggtccggcagcataaaccagtgcctgtcgaccagggagtgtcaggaggatgtgctgcttcctgccccctcccacacagggagcaaggctgtgctgaatggagatattctagtaaggaggagagtgtatgtgagaaggtgtatgtgagaaggtgtggcatccacaacaaaactaataaagcatcagcaaccttaggtgatgcggtttggctatgtccccacccaaatctcatcttgagttcccacatgttgtgggaggtaattgaatcacagggacaggtctttctcatgctgttctcgtgatagtgaataagtgtcataagagctgatggtttcataagggggagtttccctgcacaagctctcttctcttgtttgccaccatgtgagatgtgcctttcaccttccactatgagtgtgaggcctccccagccacatggaactgtaagtccattaaacctctttcttttgtaaattgcccagtcttgggtatgtctttatcagcagtatgaaaacagactaatgcatttggaaaccaagaggctgatggtgttcaggacacactgtccccatttatagcaccttggcatttcagaaaatcgcaaaagcaggaaggcccctctcactttcccctccttgcccttctcccctggggcaggttataagatcctcatttgggagagtctttcccaatacttggaggaaaggaacatccttgtctctgaagacacagagcacagagaagaatcagaacaaacaggcctttctcagtgaccccagtttatcaccattagctcactcccagtttgtctaatcacctcctccaccactatccactcttcatcaaacctaagtacaaaatacccaagtttgcctgtttctgtgggtcttcctttccttgtgataactcctgagtcacatgaaacacatactaaatatgtgtgcctgttttcctcttgttactctttagttacagggaagggccccagccatgaacctagcaatgggtgaggaaagaaatctttccttccctactgatatggtttggctgtgtccctactcaaatctcatcttgaattgtagctccctcaattcccatgtgttatgggagggaaccagtgggagataatcgaatcatgggggcagtttccccccatacagttctcatggtagtgaataagtctcatgagatctgatggtgaataaggggaaatgcctttcacttgcttcccatttttctctcttgtctgctgccatgtaagacatgctgtccaccttctgccgtgattgtgaggcctccccaggcaggtggaactgtgagaccattaaacttctttctctttataaagtatccagtcttgggtatgtctatatcagcagcatgaaaacggactaatacacctaccaggcccggatttgtttggcaataaagtgatccattcacgcccaagaagtgggtggagctgggaaaggccagaccaaccatttggaatagtgttttttgatccacccccaggaggtgaggattggcaggggctgaggggagtgctcacctccagcaaggtgagctggagcccacagcaggactccagcctcagcagaggaactggagagcaaaccaggaaaggcagacagagctgactcacgtgcgagggtgggagaggtcgcacggcctgcccggaccctgatgagctgagcacagtgaaaacaatgccaggcctcacctgcccgtgcttaccggctggtggcaggggggctgagcaggtgttgaggtgttcacaggtgagtaggagaggaaaggcagacgtcggcctaaaggcaatcgcaaggagaaatgcgttgagaattgtagcactgtatccatcaaaaaggaagctcatctttcactgggtgtctttctaattgttagacttgacactgcatttgctgccctgatttcttgtcctaaccttcaagcttgttagaacagggactcagggactctgttttcttctcctgtgctcagtgcagggcagcaggactcacttgctaagtgctcactgacagatgtaagattattgttagagatatggacccgcttgctcttctgagcctccgtgattctcattcggtcctttgctgtcattagaatcgtctggggagaattttgtcactcctgctactctggccaaacctcgtatacttcaatcagaatgctcggagttggggctgcagcaactggaattgtttcaaactccccgggtgactgccctagcagtcaagtttgagaaccacgggcatggtaaaatcttttctcagcctgagcagcccattagcttcacctagggagctttaacaatcactaatgcctaggcctcaccaccctccatcccgtgttctgacttaattagcgtggggtggggcccctaaaacaacattctaacagcttcccaggcgatgagaatgcacagctaggatgagcttctcctctgaagcatgaagacccacagaatactgcagagttgctgggggtggccctgcccaaattctcgcctaaaaccccaactttcaatgacattgtggacctgctttcgtgttattataaggtttacaaatttctatgccacctatcagaccattttttaaggatgaaatcaaagtttctataagttgtgtagttctttccctgtgcattttatcgtaatattgaaaaacgacagtgaaaagcaaccaaggcatctcggcagcatgctgctgactagttcacgcagttaccaccaaagcgcatggacgggacccagagcatgagcgtgtgcccactatcggggacagaaacctaccgcgttcgagttttgacatatttctcgcagttgttgaaaactatgaggcatgaaatccagatttatgactttttaaaaagttatttgtggattcccaagacgattatgttcccatcacttatgtagccttaaaagaaaaaaacctcaaatgatgctttaaaaaaatccaagtttggcgctcattgagttccagtgtcagttgtctgaatcgccttcagcgaaagtcagggggaaaaaatacattccgccttcctttaactgctagttcgtcatggagaacagaaagtcccatttgcatgtggcttttggaaaagctaagccgggagcgattatcctgatgcgcttttactttttgcataaaataagaatttgaggaggatgtcccgggagagtgagccacttctcatttcccaggcctcgcctgccatgctctttgacaacatcatagattttatttttgccgggaatctcattatcaaagcaatgccccccgccccccccccacacacagactgccaggtaaaccacagagggtgaggggggtgcaggtcatggttgccttattacacaccctcctctgccatcacctccttttttgtctggataagttctttggcagttctctcaacttttatttctgaaacatcctgaaacatctcagtattaaaagcaaggccgattatataaacgatactcccaggcctgacaacacatggttttgcctgaggcctttactgccaagagccgtaaggaccctctaagtcatgttcgctatttttactggccttgagagtctccttgctttgacatcctcttgtctccattgtcagactgttaaatgctcatgcttctggttctcttaaatagatgcagatgtgtggggctgggttgccactgagccctcttctcttttgcaagagctgggatgcagacagaaggcggtttggaaaacacgagccaccttgattttagacaaactctaagttacaatcaggtgtcttcatttatgacatttaacttttacttaacctaatcaagccatgttgttggctactgattagaatatccttttataacttaccttaaatctcactacttgttccaaccatcccaaagtctggcgtcaactgtcattgcatgctgctcttttcagcctttctagttcgactcttagcaaaagccataatcttcctccagtctgtttcctttctgcagtgacaaaattgcccagggaaaggaaaaagaacagcatctatcttctttctttttagctccctggtttaaggctttcttttcccccatgatgaaaaactataatcattctgcttagaaagtacagacccctaagcccacttccaaaagaaggatgcattttcaagtctgttatctttactttcccagagcctgggggtctcccaggccagaagttgacagaactgtcttcatacactcgagacaacttcatgcccatttccttaaaactaagaacataagacgctgatttttcttccagaaaaaaaaaaacctttcttgttctttcaagaactgtttcacggacagtgtttcatattacaaaattgaaacttgggacttttgaactgcaaatttagcagaaaatgaatccatgcgcttgtggctttgcttgtcacctctactcagatgtctcccagacccctctccagctgcaagctgcaggcagaactgttcctctaaaagaaaacaaactcctgtttttcctactactgctactgcttctactgttgctacacacacacatacacacacactctctcacacacacactcacacacacacacacacactcagaaaacacttctgacaccaaatgtatgggtttttttcatgccaaacaattctgcagttcactgcagacaccagctgagtgtcctacaatccaattgtggcaccgcctgcctggagttagcaggtgaaggactcagccccgcaagcctgcccccctacccatgccaattgcttgtcccaaatccccgttctaactgaccagcggtaaatcaggggttgccacaaccccctcctgggatttgtaacttgctgcagcagctcacaaaactcagagaaacacttaacattgaccaattcatcacaaacgttattttgaaaggatgtgaatgaacagccagagaagagatgcacagggcccggggccggggagcagggcatacggagctgccatgccctctcagggggcatcacctcctgcaccagggtgtgttcaaccccaaagctcctgaaccctttaacgtcaggatttttttttatttttttttaaagacatagtctcactctgtctcccaggctggagtgcagtggcgccatctcagctccctgcaagctccgcctcccgggttctcgccattctcctgcctcagcctccccagtagctgggactacaggcgtccgccaccacgcccggctaattttttgtatttttagcggagacggggtttcaccgtgttagccaggatggtctcggtctcctgacctcgtgatccacccacctcggcctcccaaagtgctgggattacaggcgtgagccaccgcgcccggcctgacgtcgggatttttaaggagcttcattacataggcaggactgatgaaatcattggccattgagtgaaccccagaccttgcgggggtggggctgaaagtttcaaccctccaaagattgggcacgttcctctggcactcggcccccagcctccaggagccacctcattagcatacacgcaggtagggttggaaagggcttgtgataaatgatgaaggacgttcttctgcatcgctcggggaattccaagggtttaggggctcactgccaggaacccggggcagaaaccaaatacatatttctcgttatagcacagtgtcaccccctcactctgcctaatttggtgactagctgccccatcacattctgcctatttaagccaagccccccttccccaaggccaacctcctctcctccacagccagcccacttcccgggcgtgataactcttctgccccagctggagagttgttctgaggctttcatccttctccacgtgccgcctggcagtgctgctgcctgtcttttgagggctacccctttctccattacctctgcgacctggctagtccacatcctccccgacccgtgctcttcagcaccggtgcctgccccgctcagtgcatgtcctcatccctgcagcctccaccctgggcttcctgacccccactgcgtccggcaccgctggttgcgggcctgctccggctctctctgcccagctggctggcctgcctctgttccgacctcccctgcctggcctggtgttctgggcgcctcctccgctcacatcgccgcttcacctgcttttgctatctgcactttccatgtcctgctccttctcccagctggtggtgcctctgagaagaggactgagaaccgcctgtgaaccccgcaatttcgtgggtgtggtggaagcaaaggcagagcgtgtgagtttagtgggcgtgcgccactctttcaagaagttttgttacaaaaagatgcaaaggaagtgaagagggaaggggtttgcaggttgggagaaataacagcatttgtgttctttgttgttgtgacggttttgagccaaaacatgacaaacgggacagaaggaagacctgatggagcgtgtccttgagaaggcgagaggcatggggttggcctgctgggggatcggccttccatatgggggttcctctccagcagcctggggttctgaggaaggcaggcctgcagcaggtgccgggtgccgggaagcaggagacatctctgttactccactgtcctcagtggggagccacggctgagcgtgagaaagggcttataggctgaaggccaggcagacgggaatggccaggcagaggaggggaggacgagccgggtagaaacagtggatagaaacacggagggccacacggccaacggtcaggggactggcacaccagccagattcacccgcggcgatgccggtgcagagaagctcggcatctgaatttaacccgggttgtggtttgactcagtctgacgtggagagaagggccagggagtcacgggggggtggtgggctgtgtgctggtttaggggctgggacatggaggggtgaaggcgggagtcagtcgcatccgctgggcaggggcctggggctgcagacaaggtgggaggtggcagctacggaggaagctgcaagggattctgcagttccccggggagacaggagcccaagggaccggggggtgagggggttggaaggggcacctgtggatgtcctgagacttccaggaagtgggacaggatcagtgatggagatagagacagagtcatcagggccgagaggaatgacagtaacagcgaggttgaagtgggcacccccgtctagcagcacggggtgtggagctggcttgtggacggccagggaacaggacgctttgaggtggcagccaggggcagggatgcttttgatcgccaagggagaagacttgatgcagagtttcaggagcctccatgacttccccatctgaagaccttttttactttaatgggattgaagtgatcaccagaatagttaatggtgtgctccgttcctatttctctggtttttctaaggtccacaggctgcagacatcgtttgtacttctccctggtgccaaagaccagttaatgccgactttgatgggctcagtgcaggccacattgtcacgtgtaactctacactgagaattattttagaaggttagactcctaaaaatgttttgtttttccaaatggtggcctctgggtctgacttcacctcttttgcaatgatcagcactaggatatggttttggagacggttgtgcagagccagggctttcaccaaagcttggccgctcggacaggactcacgatggaagacggtcaggtgccccaggtttcagatgcctgcctcctcccatgcgtggtgaggggcctgcctcctttatagctttccgctgccaggctggcgcctcctcccctcacccccatctcctccagaggaagaccaacttaatcaaatcttaccacaactacgtactgcctcctggaaaaagcctgatttctcgccccctcttgtccctccctgcgtggaggcaggccctttgtccagtgcccatgtggcttggtgggtggtctttctaagttatcagaggacattagcaaacacacacgtccgttggcctaacgcccaatctgcagccagccttatgaataatcaacgtgacttgtctctgtagttcaatgcctatatctgcctctcagttgttattgaagctgggggcaaaaaagatggattattcattggaaacctcaaaacctcgacagctgagctttcttacacatgcctgtgtggcccccgtggtatcttagtgttcacctccccatttgcacacaggaagccagtcacattactggattcctggtgagtttgacttttcattctgtcttgaatctccctcccttccccaaccccataccccaccctactccatccctttttcttgggtcttcctgatctcaacccctccatctgtcctccacgttgtctgcatagtgagcctcctaacacacggatccccccatggccttgtctgctcaggtttctaaggtccccagtaaccacgctcacactgcgtaagcacgaacggtctggtccacacctcatcacttggcgtgcatgtgaatgttttagcaagttagctcttgcaattattgcctgccgatcccctgggctgcattcacacatgccgtgagtcttcagacacccaggtctcaggacctgaggggctcctgtgtgctttccgtgaggaactgtctttctgctcacgactccatgtcacatgccaccatcaggaagtcctccctcaatgccccaagcctactcaggctcccactttcctgcccatgaaatgtgtgtaacttctagggtgtcctgagaagcaaagaccatgtccctgcatttttgcatcctcagaacttagcctgatactcacaatgaaatgagttcacttaacgacacaacgaacgaatgtgcaggtacttctgcagggggtgatgtggggatgcgtgcattgattctgtggctcagccctgagttgggggcaggaggcaggtgctgggaggaggattttatgtcttaggaagcacaggaaggccttgccaggatccaagaaaaaatggaaagtagaccaatgtaagcgttaaaagaacacattttatcttttaaatgtgtgtacacagtacagttgacttttttgtatacaattctatgagtttaaacacacatatagattagcgtaaccactaattataagattgtagggaactggggaaaaaatgcatgcattaaggaatgatacggcatatttgggggacagagaacaggcttgatgaggacagagtctatttaaaagagacagtgggcaccgcaattggaggggaaggcggggcagggttttagagaacccctgagtgctgggctacaggattcagtaaagttattgatgagattggctgcattgtggattctgaaatatttatttaatacctcgaggagggtgtgagtagattgtgctgatgatcgcataactctgactatactaagaaccactgagttgcacccagagcttgcattactgagcgctttaccagttaggaaggtttcgcgtattccgtactttaaatctaaggtgacttgactgtaaggcctgcgagtatttcctggaccactcagaggaagaatgctgtgaatgagaactacagccctgtaagacacgtcctgtatcattgttgagatgggaaagtgcatcttaagacagttagcaggccaaggagcgactttaaagggtgagctctgcctagagggaaaagcgaatgcactaattgaaatccaacaccctgggctggagtaaatgaaccgtcagccacccatggggcttcatttcttggtgatggataaatagctgggattccttgaagctagaagccatggggaaattctgttctgcttagctttgtcaacagtacagtctgccttaactgacttggaggtaaatagattcggagagtgtgagctaaaacccattaaatcaggtgaagacacaaaggcaagcacagccaatgtggtttaaggcaaagctaatgtcccttcggccttaactgacggactttcctagcagtcctcaccctctgcaacccagggctcctaggaggagctcatggcagagaaagccttctggcttctgccactgcctcctcaactacatgtatacatcagtgtatatgcatgggtatgaaatgaacattttatgtcaccattagcagaggaaagctggaactctttcaaaccccacccaaaattcactctgactactgagcagtcctgttgtttattttggaggccacttaaccctggagcagtccataagctccacttaatcccctcttctttcatgatttcttttaaagagacatcttgggttctgtaggggaacatttgtgcttcactgtaaaactccatttgaggcctgctcacggcctgccaccttatctgcttgcagccttcattgcttgggagctgttttacagcttcataagttgtaaatagctgctggcaatgcaaacgcgcttgtctgtgggcaggaaatgaattctgtctggtagagggaatgcttcctaccttgtaggaaagccaatattttttgtccattagcaagtttatatcagtattcctaatcattaaatgtgttcttcggattgtcctttgaaccagttatagcatttgagttaagtaaaatgaatacactgttgtttattttatacctgtatgaaagttatgggttttttggtggggggggggtgttttttttgtttttttttttgttttttttgaggtggaatctcgttctgtcgcccaggctggagtacagtggcgcaatctcggctcactgcaagctcctcctcccaggttcacaccattcttctgcctcagcttcccaaaagttatgatttttaaaaaattatcttttaacattttttagctagaaacttctgggtcaatatataaatagatgagcctggttatatctgaggttttcactgaggtaacaacaaaaataaaacaacacgatgccaccgagccatcgttccccaacttacgtctgtcccctccacatgtcctgcacgcactcctgtttctggggtgtgtgcatgtgtgtgtgtgtgtaaaggtttgcaatgaaattagaatcattggtttttgttgggggtggggagttgtattgttttgagacagggtctcgctctgtcacccacgctggagtgaagggtcacaatcacagttcactgcagcctcaacttcctgggctcaagtgatcctcccacctcagcctcccaagtagcggaaactataggcatgtgacaccatgccgggcttgcttatctatgtctgtctgtctgtctgtctatcatccatctatctatctatctatctaatctatctatctatctatctatctatctatctatctatctatctttctatctatctagatggggtctgcctatgttgcccaggctggtctcaaactcctgggcttaagcaatccaactacctcagcctcccaaagtgctgggattacaggtgttagccactttgcccagctgaagttagagtttagagcacattgctgtaaattgcgattaccaagggtattgaaaaatccatgaaaataataaacagcaagttgacttcagaatttgtgcgtttgaggcttttcgccttgatctccaggtaacacacaggctccttggcgagagccagtggtgatacaatgagaacaccgcctgctgcatctaatatttgcagcttagaattcacagctaactttttaaaatgtaccagtgtgggggaaatggtgctttatttgctggataggaaaattggccaagatcagaattctgaaggcagtgtcacagcacaaagaaactagctactgaagtcacatcctaaacattcgagaggttgatttccttttctactgcattacaaaaaggtttatttactgcttatccatatagtgagatagagattagatctcagtttttggttaagaacaagcattatcataaatgtgtgtgtgtgttgtgtgtgcattttacaggatttttaaaaatacacagagaatttttcacagttgttaactctggtaaatggtggggaaggcaggggtgagaactgatctattattcataatctcaatgatgaacaagctatttccaaaaataggtggattatttaaaattattattattaggatattttgggcttctagaaacaaaaacttaacaaaaaagtcacttaaagaatttaggggtctttttttctgacatgaaaagaacaaaataaaggatgatttcagtttggtccgtcagtgacttagaagtgtttttcaggacccaaggctttccgccttcccactgggccattttcagcgtgtcccgtggcctctgggggcttcagtgatccaggcgtcacattagacatgacagtgtccagcaaagagaagtatttctgctttgcatctgtttataacagtgagaaaaactcccccagaatcccaccagcaattgattctcacgttgcattggccaggattgaggccagctgtgccatgcttagcgcagtcatttgtattgcgatcaccgtgattagctcagacccatcctgggacttctccttgggcttgaagacatggccaggtggagatcggtgccccccagaagaagtctttgttctgccaataaagaagacacagacaacagtgtctaacaggaaaagcccctttttactttatacccttccgtattgcttcaacaatcaaatactttattttattgtttgagacagagtcctgctgtgtcgcccaggctggagcgcagtggcgccatctctgctcactgccacctccacctcccagattcaagcgattctcctgcctcagcctcccgagtagctgggattacaggcgcctaccaaaatgctcggctagtttttgtatttttagtagagatggggtttctccatgttggtcagaccggtctcgaactcctgacctcaagtgatccactcacctcagcctccccaagtgctgggattacaggcgtgagccactgcgcccagccttttttttctttagatagagtgttgctcttattgcccaggctggagtgcagtggcacaatctcagctcactgcaagctccacctcccgggttcacaccattctcctgcctcagcctcccgagtagctgggactacaggtgcccaccaccacgcctggctaatcttttgtatttttagtagagacagggtttcaccatgttagccaggatgatcttgatctcctgaccttgtgacctgcccgcctcagcctcgcaaagtgctgggattacaggtgtgagccaccgtgcccggccagatactttcataattaactttttgaatgtatgtgtgtcctactttaaaatgaaagatactctttcttgattctatttccatgcagcttggccccgtgatgctagggaccatggctttttcttgcagtgtgactcaccatttgccaaagcaaatctcttgccttgcatcagctcagtctctttgtctgcaaattaaatcagtagccctttccactgcctatctcgcaggatatagtgccaaaaatactcacaaagtcaccatccaggaagaatcatttgcccctgctgccactgtctcctgcaaggcacatgaaagctgctgaggctcggtatttattatgctataaaattcaacacaaggggagagaacaagcaaattccatgagcatatataagtgtatcggatctactccattgatgctggagctatattttcacagtaggatcctcttttgttaaatattacagtagtaggaaaacctagcagaagaatagttcactgtttctctgattttgtgagtgatgtgggctgtggaatttactctttgctgctcttcccccaacctgcaccctacccctgcctccgaggtcagccttgcctgctgcccctgactgagaggaccccgacgtcaccccaccccaggttatactcctctgagaaggtcccttcatcccttccccgaaatacatcccctcaaatctctaatttgtgtgaaccattaatttcagatattgtaggaaaaataagcagggaaaatacgcaaaacaaaacgtggatggcacataacccatagcatctcgcagggtgtgtacactgaagaagtctttaccaacccgtagttaggaaaatgcgtgttcagaataactgggccttcccgcggtcctctgagtcaaacagatgaccacacattgccagaatgagaagcagagcagcttcacatccctgcttctgaaatgtttcccaacagctcattgaaacaatctcgagacacctctctcccccaaacccagcgtgtttcgggaatggctctaggaattctacttttgcattgcctcactctccctttccccgtccagaccatggtattggatttacagcatttcttacatcctataaaagtccttttctgccaacagcctggagcgcgctggattgaatgacgctctcccagcacagccggcatttgcagtgcattagaatcttgccgtcacttgcacacgtcaccaagttactttagtgagagttcagcctagctatggctctgctgtgctaacagttgcttttcaatattttgtttgaggctttggaataattcaaaggcctacacttttttttttctaatttgtttccttggagttttacgcatggctacttcagaaaacgtcagttttatgtcattaatgtcatcatcttctctggattctcagaattcaaaattcacaggagcatggcagccttacattcagtctattcttttcataaaaaaggaagtaaactgcaacagttcgcctacgctatggagactggagtggtcccacctctgtaattctatctctgtctgccccacagctgtgccgaagcgagtgccacttgtctgcagggccgtaccgcggaaccctctttgccgaccagccagcgatgtttgtctcgcctgccagcagccccccagtggccaagctctgtgaactagtccacctgtgcggaggccgggtcagccaagtcccccgccaggccagcatcgtcatcgggccctacagcggaaagaagaaagccacagtcaagtatctgtctgagaaatgggtcttaggtaagaatccaggcacacagacgctgtggtgtggtccagatctgtggacaggtttccagggagggcggcgtcaggctcacacccccttccacgcagctggggcacctgggttgatgtctcagcctccagcatctgccctggcagcgtcgtgtggtcaccctcggcattcccgctccttgctgttagcagacgtacagttcacgaggaaatgggaactctaactggacttccccacttgacttccctggctcgtgtgaaaaatccaggctacccaaagccaccccgggccacccctgtgggcacagactctccgggcacccctcttagaccctccctccccagtgcctccttgtcctgcttcaggagtccctggcagcgcccggcactggggcccaagcccccgtccctgtcatctcctctcccaggtacatctcatgatcactccgtctgctcatgtgctcaaagggtgttaaaagacgtcaaacgactccatcttttatttgacaaagtgagcacagtgtgaccgtaatgtcccactctggcgttcatggagctgcgccaggcgccgtgtgcgattctggggaggaagaggtggtaggagctgagctgagatcggaggaggctggaaccccacgccgtgctaacacacgggctccaggagacttgcaggtgatccccggagaagagggttaaggaagagtgtgaagcaaggacggcctggggaatgcggaggaagcaggggcagcgtctgtgctagaaattacctgccctgtggtggagtcatatgtggcgggacaagcctagggctccactgtggggaaatcccacaccctcctccatggggttgtgataaacatgttagtttgcttgggctgccatcgcaaaatactacaggctgggtggcttcaaacaacacgcattgtctctcagttctggaggctggaagtctaagatggggtatcggcagcgttggtttcccctgaggcctctctcctgggcttgcagacagctgccttcttcctgtgacctcacgtggcctttcctccatgcacacacatccctggtatctctgtgtgtgtccaaatgttctcttctctaaggataccagtcagattggattagggctcacccaatggcatacttttatttgcttttatttatttttttgaaacagtgtctcgctctgtcacccaggatggagtgcagtagcatgatcacagcttactgcagcctcagcctctctggctgaagtgattctcctgcctcagcctcccaagtagctggaactacaggtgcacaccacgatgcccagctttactttcttttttttttttttttttttgtagagatggggtctccctatgttgcccaggatagtctcaaactccggggctcaagcgatcctcctgctttggcttcccaaagtgctgggattacaggtgtgagccactgcacccagccccagtggcatcattttaacttgtctttttcaaggccccatctccaaatacagtctcatcctgagttactgagggttaagacatcgacatacgaattttgggcagacacaattcagcccataacaatgaatcactctagtttcagcccctggggccaagatccttacccgactttagaggtacatcccctctctctctctcaatctctctctctctctcctgttctctcattctttttctctctctttgcttccatctccttccatgtttcctattcagtctcctttcttagtacttttgcatgtctctaaatcctaaacttctggcttttctcatcatctgctcaacattatcccttaatagacaagtagatactgtgtttgttcaagttacattcgtatctaactacggacattttacaagtatcttttacatgactgatggtcatcctttcatatattttagaagtgtggcaatcaaaagtaattttttactctggtgcagagtaattcatcttttgcctggaaaccaacttccaaaaaaaaaaaaaaaaaaaaaaaaaaaaaactattgattttagtcacagtccaaaagctaagaggctgtttacttttttctaaatgccaagaatataaccttcaaaacatcctatgttctgaaacagaggttgttgttttgtttttctggagaagtgtattatcaaaatgccacggactgcagaacagaactgggcctgaaagcatgtctgggccagctgacggaactgtgcacacgattgatatccacagtgcatatcaacaggcagtctttttggagtttgcaaagcgtgtgccgtgcagtgcccgagcctgcctctgcactcgtgtttccaggttgggtggctctgacagccccttcctgtgggtcctgcgtccttgtgtggagtcacgcttgctcggcagctgctcacttcctccggttgttttgccgctcggctctcccgcccgtgggttttcaggaggcgaatgtctacctgcttaatcctgaggcttcgatcccgcaaagcccttcagagttctctgacttccaggcctgggccacaggccccagcctctttttctttcctcctgtaacttgtgtcctgtttctgatttctcaccaattatgccatctgcctgtgcccttggtaacatctgggtattgtgtgtgctgcagacctcacccatgtgagacaggtcccctcactcgccggccaccagaccccagtgtagtgggcgtctccagcgtagtgggcgtctccagtgtagtgggcatctccagtgtagtagacctctccagtgtaccaggcctctccagcccacactctctgagatgtaagatcacgtagttctcaagtatttattggcttgtatttttctctttgtgaagtgaattccaatctagtagctgcagctatgtacgaataaagaagggtttatttttctgtccgtacatacttctggcttttctcaccctctgctaaacattatcctttaatagacaagtagatttttttgtatttttctctttgtgaattgaattccaatctggtagctgccgctatgtacaaataaaggaaggtttatttttctgtccatacatacacacgtaaacctacagaacacacagtccagggcattgcgtttcctgcctcatccaggtccaggctatttgcttattctctaaccagaaacaaatcatatacttttttttttttttttctgagatggagtctcgctgtgtcaccaggctggagtgtgcagtgatgagatctcagctcactgcaaccttcacctcctgggttcaagtgattcttctgcctcagccttcccagtagctggaattacaggccccgccaccatgcccaggtaatttttgtatttttagtagagatgaggtttcaccatgttggccaggctggtctcaaacccccaacctcaagtgatcctcctgcctcggcctcccaaagtgctgggattacaggcgtgagccaccgtgcctggccgaaatcacctattttctgtggaatgcatttacttcatgtataaaacagagtcatagcctccaccttgcttaccccacatgctggttaaaggaggaaacacagagagcgcaaatgccctgtggcaggcgtaggcttcttaagtgtggcagattgacggtatccatggatgtgtcctcatcatccctgccccttcgacaaagcacattgtgtcttttggagactttttttcctcccgttcatttccattataacaaatgcttctctggacaatgtttcattctcaaaatatcgcaatattgaaaaactaggaatatatcaaaccattttaaagcaccaaatcgaaaaagaagttattttgtttaaataaattaaattatgaaaagacaatactcaaaaaaaaatcaattaaatttattcaaactggaatatcaactgctttgtaaggtagggtccctgagcgtcttagagtaatttgagccgggcgtggtggcccatgcctgttgtcttagctacgtgggagcttggcttgagcccataagttcaaggctgcggtgagcaacgatcccaccactgtactccagcctaggcaacagagcaagaccccatctctaaaaagaaaaaaaaaagaatcatttttcagtgcctttatattgtttctgtatcttaacagtcttgttttgcagatgtcgtaaactcacagggggtggagaaccaggagttttttagccactaggaacctctctgagaagtttcttttcttttcctttctttattattattagtattctgtggccagaggagggaaaggaaggtgggtactgaaacgacagctcttcccctgggactgcagcatccgagcaccacagtccacccgccagcctttgttcctgcacagtctgcctctcaagaccaacaactccatatctatgacgataaaaattgttagtgattattttacttgtaagaatttctttcgacctcagctctgaggtgaccctcagctcgcccgccaccccagctgccccaccttgctggcatagaacagggagtggaggtgtgaagtcactcaacagggctcagtatacaaaatgtaagccacgcctcactcacttgctccctggagaatttcatctgcgccgcgttgcctaataacggggttatcggaaagggcatgattacgttccctcttcattccctggagtcttttttccctgaaactgtattgtacttgggccaagattcttgatgaatcattcaaccagaaggagaaatggggttgttgtttggtttttttgttttgtttttttttttttttttgcgttttgagagagcacacttgtgggtggttgaacatggataaaaataaacgggaaaacaaaaatcaaattcccggccctaggaaataaaatgttacctttacctgatattgataatacatattatatttgaaagcatttgctaatggttgcattttccccccaacactcccatgacatataattcccattttataagtcacgaaacgaagaccctggggtctgaaggaacttggctggggtgaggatcacaagcccttgggtggagctctgagccctggcgcggtcctcaagggtctgcgacatttgtgctgtggtcagctctgtgcactcttccctccctgctgctgttatcacgaaaggctggcttggcctttctcataggcgtatttccactctcaggcgcccttttattgtctgggctccattcaagtgataagacatacatttatgctattgtgggaacataatgtaatattctcaacagcattgccaaaaaaaaaaaaaagtttagcctccgcctgattttcttataacttataaagaaaatttggtttgaacatgtcccatgtcgatgttttcaggaaaaagatccgatagcatgcaggccttctcatgctggcctggctcattcatcgtttcccctaatgactgactgaccagaaaaatgcacgacgctcccatggggccactcgggaggcctcaggccttcgggcttcctgattcagtagatatgtgaggcttgatcagtcaccgcagtccacatctccattgcctcgataaggaaccagtcgcagagaggggaggccatctgcagaagctgtggagagtggcagagaggagagtgaggacggggactgcccccttccagcccctctcctccaaggacggcctcattttatccccacccaggtttccacacccaggagctcagcaaccgctcagaaaatgtttgtggaattcaaagacacaattcagacaatatgaagaattatttttcctttgagttgttcttaaaacagacgaaatctaccagcatataaatgaatgagaactaaaactggtgggatttggtaatgtcgacatctgagatgtttaggcttttaaatatatatctcagccaggtgcggtggcccatgcctataatcccagcactttaggaggccgaggcgggtgggtcgtttgagcccagcagctcgagtccagcctgggcaacatggtagaatctcgtctgtacaaaaaagtacaataattagcgggcatggtggtgcaagcctatagttccagctacatgagaggctaaggtgggaggatcacctgagctcagggaggtcagtgctgcagtgagctgtgatcatgccattgcactccagcctgtgcgacagagtgagaacctgtctaaaaatatatatgtgtttatatatatatatttatataaacattagtgggttttaaaaaaaattaactaactgctagctcctaaaacagtattttgccattagctttggaaaggtttgctcagaaaatgaatttctaagcactcccttcattgcatttattggtcaaactaatggtcctggatggttatctttgaaacttcctaacctgttgggtccccgtcgttaaacttatgccaacagaactaaactcactggatgtgaattgcatcagagatgtaaacatttaaaagcgtattaaggctgggcgcagtggctcactcccgtcatcccagcactttgggaggccgaagcgggcggatcatgaggtcaggagatcgagaccatcctggctaacacagtgaaaccccgtctctattaaaaatacagaaaaattagccggtcgtggtggcaggtgcctgtagtcccagctactcaggaggctgaggcaggagaatgcatgaacccgggaggcagagcttgcagtgagccgagatcacgccactgcactccagcctgggcaacagagtaagactctgtctcaaaaaaaaaaaaaaaaaaaaaaaaacattaaaagcagaccaaaaaaatcctagaatacaggagtcagctgtctattcaattcagaataagaaatattgtagacaaggcaacattttatgtgtattagaaatgtggtggttggtttgagaagtgaaaccagccatgtatatgctgctccaagcattttggttgtggcaggaaactttgaagactattttgctgtacaaattcacaaagccccctgcaaacactcccgtgcttggggtgaatgcccaagtgtgtcacagctgccttgcagctctgaggatcagaaaggttaatggacataaaagaaacttcaaagctcaacctcctaatgggaagctgcccttggttttaggctgtctttgcttactgaccgacttaattcatgctttgggttatgactgtaggagagattttcctgtgtctttggagtatgctgaacttgtgtttctttttgttgttgcatattagacagtcagtgttgaaactaaagtgacctaaagtgacagagctcatgttatgggctgaattttgtctccccagaattcataggttgaagccttcccagtccttagaacatgattgtatctggagctagggcctttaaagacataaataaggtaacatgaggtcataagggcaaggccctaatccaatatgactggtgtccttatacgaagaggaagaggccaggcgtggtggcttacgcctataatcccagcactttgggaggccagggccggcagatcacttgaggtcaggagtttgggaccagtgtgtccaacatggtgaaaccccgtctctactaaaaatgcaaaattagctgggcatggttgtgggcacctgcaatcccagctacttgggaggctgaggcaggagaatcccttgaacacaagaggcggaggctgcagttagtcgtgatcccaccactgcactccaacctgtgcaacagagcaaaaccccatctcaaaaaaataaaaataaaataaaggaagacaaagaaacaccaaagatatttttgcacagagaagagtccaagtgaggactcagggagaaggtggccatctgcaacccgagcagtctcccaggaagcctcaggagaaactaacccctgtgacaccttggtcttggacttcctgccctccagaactgtgaaaaaatacatgtctgctgtttaagccacccaccctgtggcattttgttatggtagcctgagcaaactagttcagcccaaaatgaattctgatatcacctgcagaaatctgcttttagacagcaggaaactgagggcctctgagtttctaggccagagtcatgcagtgaattactgaaagacccagaaccccagtcctggcccctgattttcagtttagaatcttccttggtaagaagcaggatcttaggctgggcccagcaagtggaaaactcttttttgtttacacagccactgactgttgtggtctcagactgtaccacagaacctggtgttccacaaacttccccagtttggagcaagagaaaaaagtagttggatgaaatgatctcattttattttttagtcaatttttcttaaatgttggtgcttgaaaacaaatggatggcagtaaagtaatcctgaagaacacaggaggaaagaaataaaagaggcaataccaaatgttagcaaaatggcagcaaggcaaataagaggctcagcaatagcaaaaaactgacttctttggctgggaaaaacttataaatattaaaaatcctgacaatgttgaaaaagaaaggcagagatagggttccaggagaaatactaagaatgaaattggagctgtcactgcagttatcgtaaggatattttaaaatcataagagagcatgatgaacaatttaataccaataaatttgaaaacaggtaagatggatgatttttagaaaaatgttaccaaaattgattcaagaaatagaaaatctaaacaagctcaagcgttaaaaaaattaaataggtaaaatatgtacatcaactgggcacagtggctcacgcctgtaatcccaacactttgggaggctgaagtggacagatcacttgaggtcaggaactagagaccagcctgaccaacacggtgaaaccctgtctttactaaaaatacaaaatgagccaggcatgatggggcatgcctgtgatcccagctacttgggaggctgaggcaggagaatcgcttgaacctgggaggtggaggttgcagtgagccgagactgtgccattgcactccagcctgggcaactagagcaaaactctgtcctaaaaaaaaaaaacaaaaaaaaaaaacaattatatatcaacaaaaaaaagaaaattttaaaaagtaacaatttgaaaaagtcaaataggcaatcaaaagtattcctttcaccagccactaaaaaggcacctgtacatgggaatggtagcaaaatgacagaagaggaaactctaacctctcatccaacacagaaaccgctaaaatcaggcagaagctgtctgcagagatgttgcaggtgctctaaaaggtgctctaaacaaccaccaaatgcatacggcaaccaggcaaatgcctgatagaggaaagccatcttcaagcccgcaggaaagttttgtggcacatggtggcaacccagttcccagttcccagttcccttcctcaagctgcagggagcagaccagacatgatctgttctagtctagctgattcatacctgaaggattgatcctcatctccatctcacataacatgcaaggtgggcaagagaaagaggtgggcacagctcatgaaagccacagagaggcaattaaggtaaaaatagataaattgcactatatacaaattaaagacttcagtgcatcaaaggatacagtcaacagagtgaaaagcaatctatggagtaggagaaaatatttgcaaataacgggttaatcttcacaatatataaagaactcctgcaactcaacaacaaaaaaaaaaccccagtttcaaactgagcaaagaacttgaataaacatttcttcaaaaaagatgatataaatgtccaataggcaaatgaaaagatgcttaacattactaatcattaggaagatgcaaatcaaaaccacaatgagatagcacctcagcacctcacacccattatgattgctactataaaaaaaaaaaaaacccagaaaataacaagtgttagtaaggatgtggaaaattggaaccttgtgtctgcctcatgtaatgttgggaatgtaagatattgtagccacgatagaaaacagtgtggcagttcatcaaaaaatgaaaagtagaattactgtatgatccaacaattcctcttctgggtatatgccaaaaaaattgaaagcaggatctcaaaagaataattgtacatccacatttatagcagcattgttcacaatagccaaaaggcagaagcccaagtgttcatcagtggatgcataagaaacaaaatgtggtctatccatacagtggaatattattcacccttaaaaaggaaggagattctgatacatgtaacactgtggatgaactttgaaaacatcatgttaagtgaaataagccagaaaccaaaggacaaatatcatacgactacacttataagaggaacttagaatagacaaagtcacagagacaaactatagttgaattaccaagggtggagtaggcaggaagggagtggagaattattgtttaatggctacagagactcagttttggataatgagaacattctagaaattaatagtagtgatggctgcacagcattgcgaatgtacttcatgccactgaagtggacacttaaaaatagctaatatggtaaattttatgttatgtctatcaaacttttaaaggcaccctccacagatagttttagtagtaagttttaccaaacattataaagttttacaggaaaaaaaaagaaatctattcacctcattttacaaggctacattgatcttgacctaatactggtttaaaaaactcatttgtaaacaagtacataaaaatctgaggctgagcgcagtgactcatgcctgtaatcccaacactttggaaggccgaggggggcggatcacaaggtcaggagatcgagaccatcctggctaacacagtgaaaccccatctctactaaaaatacaaaaaattagccggccgtggtggcacgtgcctgtagtcccagctactcgggaggctgaggcaggagaatcacttaaacctgggagaaagaggttgcagtgagccaagagtgcgccattgcactccagcctaggcaacagagtgagactctgtctaagaagaagaaaagaaaaaaaaactcagaaataagatatttcatcaagtcaaatttggtagtgtgtttttaaaacacacacacacataaccaagtgtggtttaacctaagaatgaaaggataaatgaatagcattaagtcttcttttttctaatccattaattttcttagtagtgttaaaaagcagtagggaagattcaatgccgagtaatgatttaaaaaaaaaaaaaactcttcagaaaccaggaatagataactttcttaactatggaggttatctataaaaaacgtacaacaaatattgaatggtgaaaaccttagtttaaggcttaaatcatgtacaagacacacatgaatgctattactcttcaacagtgttctatgattcctagtcaagggaataaaataaaaaaaaattacaagaattatacaggaagggacacattttgtttgcatgtcatacagttgtctacatagaaacatcaaagagagtcaataaactgttacaactcattcagcaaaattcctctttgtaagatccactcactgaaatctttagcatttgtatacccaatgataaacaattataaaatgtaacagaaaacatagtaaataatagtggattcaaggctagccatgtaatacaggttgaacattcctaattttaatctgaaatgctccgatatcttaaactttttgagtgccaatctgtcaacacaagtggaaaattccacacctgacctcatgtgacagggcatagtcaaagcacaggtgcacgacacagttgatttagcgtccccaagggaaaaaaaagacccacccagcccccttcaactatagtataacttttccatgcacacccaaattcccccacacaagcacgcccacaatgtgtaataaaatggcacgtgtgcaggctggacgcacccaacgcagattccccacgatacctcacgtggggccgagaactccatgcattactcactgtggttttttgcttattctctgcagtgtcatgtaaaaatattactgaaaatgtcgaaaaggcctgcagatccccctatgtgtaacagtgatcagaaaaagaggaataatttatgtttatcaatagcacaaacagtcaacttgttggaggaactgaacagcagtataagtgtgaagcgtcttacagaagagtatggtgttgggatgaccaccatacatgacctgaagaaacagaaggatacgcttttgaagttctatgctgaatgtgatgagcagaagttaatgaaaaatagaaaaactctacgtaaagctaaaaatgaagatgtgaatagtgtattgaaaaactagatctgaaggcatcacactgaacccgtgccactcagtggtaggctgatcatgaaacaagcgaagatctatcctgatgaactgaaaattgaagggaactgtgaatattcaacaggctggttgcagaaatttaagaaatgacatggaattcaagttttaaagcatctgcagatcacaaggcagcgtcgaaactcattgacgagtttgccaagattatcgctaatgaaaatctgatgccagaacaagtctgtattgctgatgagacatgaccatttgggtgctactgccccagaaagatgctgactacagctgacgggacagcccctacaggaattaaggatgccaaggacagaatgactgtgcagtgctgtgcaaatgcagcaggcacgcataagtgtaaacctgctctcatgggcaaaagcttttgtccgtgctgttttcaaagagtaaatttcttaccagtccattattatgctaacaaaaaggcatagatcaccagggacatcttttctgatcggttttacaaacacttcgtacaggcctcttgtgctcgctgcagaaaagttggaccggatgatgacagcaagattttcttatgccttgactactgttctgctcatcctccagctgaaattctcatcaaagataatattgatgctgtgtactttcccccaaacgtgacttcattagttgagcctgtaaccagggtatctttagatcaatgaaaagtaaatataaaaacactgtcttgaattgcacgctcgcagcagtgaacggaggtgtaggtgtagaagattttcaggagctgagcatgaaggatgccatacatgctgttgccaacgcttgcaacacagtgactaaagacacagatgtgcgtgcctggcgtgacctctggcctacgactgtgttcagtgatgatgatgaaccaggtggtggtttagaagaattcagcttgtcaagtgagaagaaaaggatgtctgacctccaaaaaatataccttcagagttcatcagtcagcgggaagaagtacacattaatgtcatttttaacattgataatgaggctccggttgttcatttcattgactgttggggaaatagccagaatggttctgaatcaaggtgatcgtgatgataccgaccatgaagatgacgttaacactgcagaaaaagcacccgtggacagcgtggagctcaggtgtgatgggttaactgaggcccagagcagcgtgcattcacaacagaacaagcaatcatgtcagcttataaaatcaaagaaagaatcctaagacaaaaaagaaagaaaaaaaattagccgggcatggtgacacgtgactatagtcccagctgtgtgggaggctgaggtaagagtcttgcctgagcccaggagttagaggctgcagtgagccgtgatcatgccactgcacaccagcctgggaaacagcgaggccctgtctcaaaaaaacccaaaaaactaagtaaatattttgtacatgaaacaaactttgtgtacactgaaccaacagaaaggagctgtcggttctaagaccattgttagtggtgcagataccattaaaaagccccccagcagaatgcctcctcgtccccagaggacccacttcctgggcctgtaactgcttcttatgttccttctcacctaaaatgtaaaatgccgtgtcccgtaagctttgaatcaaagcacagcatggttgggagagcagaggcctgctgttgtttgttgttgctgctgttgttcagcagctgattgcggtctctgctgatgccactggctgcttagctcccctgagcacgtaagtcttcactgtgttaatggcatgtcttattttttactgtgaagtacttatgtgtgaataagtgtaaggaaatgactgcttggtagtagcatataaattcagagtcacgggcaggcacggtggctcacgcctgtaatcccagcactttgggaggccaaggcgggcagatcacttgaggccaggagttcaacaccagcctggccaacatggcaaaaccccatctctactaaaaattacaaaaattagccgggcgtgatggcacatgcatgtagtcccagctacttgggaggctgaggcaggggaatcgcttgagcctgggaggtagagattgcagtgagccaagatttcaccactgcactccagcctgtgtgacagagagactgtctcaaaaaaaaaaaaaaaaaagtcacagtcaggaatgagggtgatgccacacaaccactgattgtccacatgggggtgagggctgagatagtgatacctctgctttctgatggttccatgtacacagactttgtttcatgcacaaaatttgtttgtttattttttgaaacagagtttggctctgttgcccaggctggtgtacagtgctgcgatcatagctcattgcagcctctaactcctggcctcaagcgatcttcccacctcagcctccgttgtagctgggactacagtcatgctgtcgcacctggcaatcacaccagtctatgcacagaactatttaaaatactgtataaaattacctctaggctatgtgtataagatgcagatgaaacataaatgaattttggttttagactctggtcctatcttcaagatctctcattgtccattccaaaaatgccacccaccaccccccaaaaaaaatctggaattcaaaacatttctggtctccagcattttggataagggaaacaccacctgtaatatccttttacacatttcctggatgggaaacagaagttggtgtggtaggagtcacacataaacggcagactttcttgtctgtgacacattcttaggatgtcctagagaagtatcagcgatgtgaatgtctccagtcaaatatcagagcagaaagaatatgttgagaactgctgtattattagactgggctactttcttcaaacaacacatggtatcaggtcattcattcatttacccagtagatatttcctacacactcgtcatatgccgagcatatcctaggcactgcaggtacagcaactgacaggaatatacagcctttgcccttgtgggacttaacatttaagagagaagacaggcagcaaacaatttctttaaaaatccttctggtggtaaatgcaatgaagaaaacagggtgagtatagagaggaggagtgaggtaggccccttgcaggtgagtggcatttgagctgaggcccagatgatgaagagaaggatggactcttgtaggtctattggactggcccttccaggaatggtaagggctgagaggtcaggagaagcggtaagtttagcgtggctgaaatgaagggagagaagacaaagcaataggaaatgaagctggagaagcaggcagcttcagacaggaccattccagaccactgacaccttaacagacaacagcaagaagtttgggttctgttctaaggataaatggaagtcacagaacgattttaagtgggaggattaggctgcggtatatgtttgtttactctgtttgtgtttatttttgttttaatggatacagagtctcccaatgttgcccaggctggttttgaactcctgggctcaacggatcctcctaactcggcctctcaaagtgctgacacatgtttttttaatggaagcagagaaagcagtctcggacctttgcagtggttcaggtgattagtgatgggggttaggaccagggacgtatcgatggaggtgttgtgaagttgtcatattttaaatatacatttcagagccaggtgcactcgctgatacattggatgtggcatattagagaaagaagactcgaaggtggcacctagtcttgtgttctgagcttccagaatgaggcatctagaagccaggacccgggagaagcacggaaggagcagtggtttattcagtctgcagaagcagtgcctacaggactgctgtgtgaaagaggacacatgtgatatgagcagatgaaaatcacacagcaggcagctctgggctcattatgagaaacgactctaggaatatttgtaacctgctgggctctactgctaagggctgccttaagccatgaagccgcagaggctgggtgaccaccgtcccacagtgagggagctgggcaattccttaccagagtggagatgtggctagatctcctagccctaacatgcttacttattttgataagcaaagatgaagctcacatgggtcccgtgtgctcttgaacttctgtacattgtaccattaaccacacttggatgctggcaatcgcagttttagttaaataaagtgacttgcccaccatactataaaaaattaattttggtagcatgttgattctgtatcctaaccataagaccacacagagccatggctagtaaactttagcttgtgcgtaaatgcctgccaagacctgctaaatactgttgcttacatttaaaaaaaaaaaaaaaaattttttttttaatttaaatttcacggagctgctcaagggcagttcagcttcctattcatctctgtctccaccggccaggactggcattactctaacatctgtcctacggccacattttatgggatgtttgaggattattcctatgaagtgacattggaatttggggatgtggctatgttcagatgccaaataaacttggatagaaatcatttttcctgtgtgtgtttacagttaggaacgtggggctgtgaggggctccctggacatgaccctggagctgtcggcccttgttcagtggtcagatgcgcttcagacctcccagagtgctgcccgcacactcagtcacagccccatgcgcacctcaacgccactgctcagaagtccagtgtaattcctcaggcagcatgtcctagagcaggccatgagaggtgtaaggtacagactttgttgtgaggttacatgtaggcttctgttccatcttgtctctgtttaaagatcgatacttctggcagcctttatccccaccacgataaatacgtggatggaaggatacatgcgtggaagggtggatgggtggatggttggatggatgggtagacgggtgcatgggtagatgggtagatgggtggatggagtgatatttgatttcatagtcaaagaactcaaacagtagacaagtacacagggtcctccagtcttacaacccttccttaactacaataaagatagaagtgtatcttctagatttcttttaaaaacatatttatgaatgtaaacatattatggtcaggtccagtgactcacatgtataatctaacactttgggaagccaaggtgagtggactgcttgatgccgggagtttgagaccagccttggcaacatagaaagaccgtgtccctacaaaaaaaattttaaaagtagcctggtgtcatggcacatgcctgtagtcctagctactcaggacgtcaaggtgggaggatcactcgaggacaggaattccaggctgcagtaagccatgatcataccactgcactccagtctgggcaatggatcaagatcctgtctctttaaaaaaaaaaaaaaacatatttacatagaaataaatgtatataaacacagatattgtttagggatttgtttttatatatattggagaatgacatgctttttcaggagcttttatttaaccctatgcctagaagatccttccagcttaacacatatacagctacttcattctttttaaccattgggaggtactgtaattaatttatgtgctttctgttattttcattgttttgctattgtatttacttatttattttagaaacaagatgtcactatgttgcccaggctggcctcaaactcttgggctcaagcagtcctcccaccttagcctcccaagtaggcgggactacaggcatgaaccctgcaatacggctggcttctgctattttaaactcgtgtgtgtgtgtgtgtgtgtgtgtgtgtgtgtgtgtgtgcgcgcgcgtgtgtgtgtgtgtgcgtgtgtgtgtgtgttttctaactgaacaatctgaattcaattttaagagattttcttgagctggaattattctagtccgagcccaggctcatgaagatttctgtaaaatacattccaagcagtgaaattactgtgccctaggatatgtgtacttaaattctgatacacaaggctgcagcaatttacactattactaacggtacataaagtcctatttcctatgtcctataaattcccatgtccagtactggacataacccatattttcaatattgggtgatccgattagttaaaaaaatagatctcattaatttctaattgcctgattactaaattatgaatgagtctgaatatcttagataggagatttatcattcgtgaattacctgtcctgatcccttaactgttttgaaattgggttatttatatttttcacatggttttacagcaatgtttacataatatggacattaaacttttgttgtgttataaaactctgtctctttagctgtgcttatggtgtcttaagtattaccaagtttttaatttttaactattattttttacaaaattaaacacctcttttcctccatggcacctacccttgtggttttgcttagaaaggccttcctcaccctctgagctttaaaaataatctcatattctcctatttatagttttaaaaaatatttagacctttaatgcatgtgcatttcacttactgtataatgtgaggggaccatgttgtttttaataactaatttattgacactgacctatattgccccctgtgagtcatctcttacattcccacatggtatgggtgtgtttctggttattctcgtccattgatctgtttgtctattctgtgctgacctctattttactgctataattgtacagactgttttgatatctggtatgtcaaattttttctcatcatttctctttttaaaaatcatcttcctatgcatttttttctttcctataaactttagaataaacatgtcgttttctttttgaaaagtttgaaatttttggattacattgaatttctagatgaatttggaaagagcatcattttttctgcatttttttatgatttttcaaaactgacacctagtcagaaaactaagtgtaaaaattgaatccatagagtttttacaacctggaagaaaatacaaatgtggctgaatgactttaaaccctgagtatcggaaaaggcttccacctacctatgactcaaaagccagatgcaataagacaaagtgttgatataatttgaatacataagaaattgaaacttatacatggcaaaagtttgcataagaaaagtcaagccaggtgtggtgggttatgtctataatcccagcattttggaagactgaggcacaggaagattgcttgagcccaggagttcgagatcagcctgggcaacaaagtgagacattggctctacaaaaaatcaaaacattaactgggtgtggtggtgcatacctgtagtcccggctacctgggaagctgagtctggaggatcacctgagtccaggagactgaggctgcagtgagtcatgtttgcaccaatgcagtctaacctgcgtgactgagcaagaccctatctcaaaaaaagaaaaaatatgtaaatcataataatacctgcttcactgttgtggagagaattaagtagtatgcctagtactaataatattgttataattatatacaatgtttttaactatatcatttcttatatatataagctatcacaaatgttagtgttcctcccttctgaaattcatctgagggtccctcactgacccaggcctcctgggtagaagcacatttgtattgagaagacaacagttaaattctgggacactatcttgagctataactaagataagtcatttttttcttccatttctaaaaatatttgtagattaaacccatttttttcttttttgtaccataccaccaggatagctttccaccttccatcactcatctgtgtgacttcttaagttccttcaaatgtaactctgtaattataattatatattcacacaatcattgtgattctttaattgcaattgatttaatctaccttatcatccaatcggtgctgacagtggatttcattcctttttttttctaacagtaggaatagaatgcagtgcgcttgccaggactgaggaaagagggaggggttgtttccgccagctgccaggatcacctgtgctgacccttcagcagcacctgcagcgctatcctgggccaggcgcaacttgtgattttcataaaatagtcgagtttcaaacggatgggactttagagcttctttaatttgagctatgaagaacagagttttagaaagtatgcttattcacttggaattccataaaaaatacctatgctgggtagataggatagcacggcctacctctcaccactggtgtcataattaaaactcatatatgtatttacttatactctgccttatgccaagagtactggaagtggtgagctaagattagaaattcttggctcctatgtcacagactggcaagcttcccaccctgcccactgagtgtcctgacacaacgggaacgtgccctgcatctaatgggacatgtggctaccaagcacttgaactggccagtgtgactgagaactgaatgtttcattgtattgaatttcgtttcacgttaatttaaaaaggtatgtgtgctctatggacgtgggggggcctatggacaacacagctcttggctatttgtttttaaatatagtttcatgtatatacaaacaggttatcactttcctatgtggctggctattatgaatgctaaactgcttttcgctctctctctagattccatcacccagcacaaggtctgtgcccctgaaaactacctattgtcacaatgacagtgacctcactggcctgtggtgactgcacacagctcgcaaaactgtctttggatgttcaaatgagaaacaaaactgtgaagagaaggaactggcgtatacaagatgacttctgatatcatgtttgccatgtgttgtggttcttaagaactcataggtgactttctgatgactgaatgtctgtttcagagacgcttcgggcctttttatttttattttattttttattttttgagacggagtcctgccctgtttcccaggctggagtgcaatggcacaatctcggctcactgcaacctccacctcccaggttcaagcgattctgctgcctcagcctcctgagtagctgggattacagatgtgtgccaccatgcctggctaatttttgtagttttagtagagacagggtttcgccatgttggccaggctggtctcaaacgcctgagctcaggtgatctgtcaggcctcttctatagaattccagtctttgtgtcttagtcatgatcataattgaaaggtcacagaacctttgtcattagagcacagtactgccaaataaagaatggaaattcaatgacattgttttattactgagaacaactagagaactctgcaagtttcttggcttagactcgatctttattaatacattatctattaggtaggaaagacatttgtcagctattaaggtgacttttatctagcggagattcctctcttaaagtaatgaaaggagataggtatggggggtgttatacaggataattggtgacatctgagtgtcttacttctgcaagcctgctttatggtgagcaaagcatcaccagcaagtgatcacaatgtccactggccgctttttgcctgccgtcctcgagatgaaattggcagttggggctgattcacagaaacaccgatttgtggctgagcacggtggctcacacctgtcatcccagccctttgggaggctgaggtggacagatcacttgaggtcaggagttcgagaccagcctgaccaacgcagcaaaacccatctctactaaaaatacaaaaatcagctgggtgtggtggcacacacctgtggtcccagctcctcaggagtctgaggcagaagaatcgcttgaacccaagaggcagaggttgcagtgagccaaggttgcagtgaatcaagattgctccactgcactccagcctgggcaacagagtaactctccttctcaaataaataaataaataaataagaaacactgatgtgtctgtcaccttctaaagaaatgaaatgctaggaagtcctagccagagtgatcaggcaagaataagccataaaaggcatccaaataggaaaagaagtcaaactgtctctcttcactgccgatatgattctatacctagaaaaccctaaagactctgccaaaaggctcctggaaccgataaatgacttaagtaaagtttcaggatagtaaatccatgtacaaaaatcagcatttccaaacacagtaacattcaagctgagcaccaaatcaagaacgcaatcccatttccaatagccacggaatgaaatacctaggaacacgtataaccaaggaggcaaaggatctctacaaggagaaccataaacgagatgctgagtcccagcgaggtcggaggtgccactgagccctcatcgtggtgccgttcccgctctgggttatttatctgttgctcatctcagctgttgttcctacctcaaatttcaagtccctcaacaaatataacagaaccacttctagaatgaacctttgagaagggaggtagcagtgcattgtataggaattggcattctatagaaaaccacagaaactggaaataatgaagggttgtctcttggttttaaaataatgtatacacctaaatcatccccttatgatactcatcctctaacagcaattgaacttcaatacaatgagtcattcctgagttcactcgcttcacattacatatgtttctctataaccacaagcatcctggcttggtagtgctcccacagcaccaaaaatccctgaggaggctgacaaacattgtgctgactcatgc

SEQ ID NO: 361 - DNA, 195154 bp, Homo sapiens
  source 1..195154: mol_type = genomic DNA
gtgttcttttgcatgggtctgtatctagcattgggagccaggttttgttgttgcttattgggagagataagaatggtatatacacaaataactaaaaaaaaaatacgtggtaaatgctaaaagacaggtgcaaagaacactgagatggagctttcttgggttacacagccagttttaatgtttcctaatatagaagagctttcaacaaacctctcaggcaggctgtcttcaaatgacattacttcccccaaatacctaatttcatttatttcagaacaactctaaatgttagaggattttctgagcttaaaaatactgccttgtaatttctattggttttagttctgcactttggagaagagaataaggctccgttatttccaatattatactattcagttatttgaagacagcttccaatttctatgctcaaccctttccctctttttttttttttttttttttgagatgcagtttcgctcttgtcgcccaggctggagtgcaatggcgctatctcggctcactgcaacctccgccacccgggttcaaacgattctcctgcctcggcctcctaagtagctgggattacaggtgaccgccaccatgccccgctaattttttgtatttttagtagaaacgggggtttcgccatgttgggcaggatggtctcgaactgctgacctcaggtgatccgcccgcctcggcctcccaaagtgcgctgggattacaggggagagccactgcgcccggcctccctcgtttatatgcaggttaaaaactcccttgagccttcaactatttctttttcttttttttttttttttttgaggagtttcgctcttgttgcccaggctggaatggcgctatctcggctcactgcaacctccgcctcccaagttcaaacgattctcctgagtagctgggattacaggcatgcgccaccacacccgactaattttgtatttttagtagaaacagggtttcaccatattggtcagactggtctcgaactcctgacctcaggtgatccgcctgccttaggcctcccaaagtgctgggattacaggcgtgagccacagcggctggtgctttcaactatttatttgacatggcttcaagcttccttgccaccctagtgccgccatcgctccgtttcccttccctaccacccttggggagtaagggtgaggactggggaatggcagaggaagcgtagtttttccgaagagctgaaggcagcctgtgattatgaccttagctcttcctcttctctgttttctgatctcctaatacacgtctgtaaatatcacaagaccctgcaagtccctcacttattatctcttcaaatctgacgactttcaaccgttcgggccccacgactctctccccggactaggatctactctatggtagtgagctcagcctttctagctctctagtcctcccattgctccatctatggtttccggaggcctcaccggaagccctcgtgtgaggccgtgtgggaggccggaagttgcggcttcattactcgccatttcaaaatgctgccgaggccctaggatctgtgactgccacccctccccccacccgggctcggcgggggagcgactcatggagctgccgtaaggtgtggctcttggccttcgtcggcggggtgccgggagcgggagctggagagtgaggagcaggcggccgtaccgccagttgtgcgggtagcgggcgggaggagcttgagaggtgggtcgggcggcgtggggaaggccgcgccaggcggaagaagggctcggggggaggggaagagttgtgggatgagggctcgcggaagataaaagtggaggtggggtgacgtgaagtaactttggccaacaggtgacaaacctaaagtcgacgtagttggattgagtttaactggacacaacatttgaggactgttgaggcaatttggagaaaggaggtgggagagagggaaccgggtagaatgacattgacgtgtcttaagtttttaagttagtttttaggtctgcggacagtctaccttagaggcacttgagtgcttgtttgaaaatgcttgttttggcttggcgcggtggctcacgcctgtaatcccagcacttcaggaggccgaggtgggtggatctacctgaggacaggagttcgagaccaacctggccaacctggtgaaaccccgtctctagtaaaaatacaaaaatattagatgtgtgtggtggcgcatgcctgtaatcctagctactcgggaggctgaggcaggagaatcacttgaatccgtgggcgggggttgcagtgagtcgagatcgcgccactgcactccagcttgggctacagagggagattccgtctcaaaaaaaaaaaaagaaaaaatgttcgttttggggccacactgaaacctacagacagtatcgagatggggctcagagaaatatattttaatgagcacacctcccagtgatttttgtataccttaaagcttgaaaaccacaggtttttttggttgtgtttttgttttgtttttgttttttttgagtggagtttcgctctttttgcccaggctggcgtgcagtggcgcgatcttggctcactgcaacttctgcctcacgggttcaagtgattcttctgcctcagcctcccgggtcgctgggattacaggtgtgcgccaccacgcctggctaattttgtgttttattagagatgaggtttcaccaggttggccaggctgttctcgaactccagacctcaggtgatccgcccacctcggcctccgaaagtgttgggattacaggcgtgagccaccgtgcccggccgaaaaccacagtttaaaagcaacacccggagaaaatgctgcagctctgtgctgttggcacgtggaactagtatctgtcaaagatacttggaacctcttggtgttaagtattactgtatctcagtttagatttagtcttctctctcctcatacattttttttttaatagatgggatttcggccaggcccagtggctcacacctttaatcccagcactttgggaggccaagggggcaggtttgcttgagtctcggagttcgacaccagcctaggcaacaaactgagccccatctctgcaaaaaataaaaaaatcagtgtcatagagcgagcttccagtcccagctacccaagagactgaggtgggaggattgcttgatcccaggaggtaaaggctgcagcaagccgggatggagctactgcactctagcttaggcgacagcgcgagagcctgtctcaaaaaaagagatgaggtctcactgtgtgctcaggctgcagtgcagtggctattcacaggtgtgatcattgcacactacagcctgaaactcctggactctagggatcctcctgcctcagccctccggaatagctgggactacaggcacaggccaccggctgcagttggttttttaagattctataacaatcgttaatctttaattaaagatttaatcttcccagtttaatcttcccactttaatcttccctgccgtcccaggtcctgtagaacacctacgttctggatttgacttattaactgcttgctctccattttccctagtaacttgcagttagtaggtaggtctagatttggattatttatcttttggtcaggaatacttaataggtgttgtgctagtttcttgttgcttcataatcaagtagtatatggtgtgtgaatgaccctcttttagtgataaggttggggatggtggaatggtcagcctactccacgtgttttctttccaccccaacctttcactcagatggctttagcatcccctacccctgccactggagtgaagtggtatgatcttggctcactgcaacctctgccttctgggttcaagctattcttctgccgcagccacgcaagtagctggattacaggcgttgtgccaccacgcccagctaatttttgtattttcagtagagagaggttttcattatgttggccaggctggtcttgaactcctggcctcaatctgcctgccttggcctcccaaagtgctgggattacaggtgtgagccactgcttctggcctggaatctcgtgatgactgttgaagaggtgacatttaacctgagacttgaaggtttaggatgaatcagttttgtacaaaactcacagtgctccaaatgaagggacgatttgtgcaaaggccctgtttgagaaactaaaagatcagggtggctgaggctcaagatacgactaaacagtgcaagataagagtgaaaatgtgctgaggggatagaccacgtgtttatctttacagcaatagcaagctgttgagcagggcctgacactataggatttttttactttttaaaatgcttttggcaggctgggccaaggtgggcggatcacctggttgggagttcgagaccagcctgaccaacaaaaagaaaccgcgtctctactaaaaatataaagttaaagttagctgggcgtgatggtgcatgcctgtaatcctagctactcgggaggctgaggcaggagaatcgtttgaacccaggaggtggaggttgcggtggaccaggatcgctccattgcactccaacctgggcaacaagagcgaaactccgtctcaaaaaatatatgtatatgaaaaagaaaaatacagtggttggattaaagaacattggcctggcatggtggctcatgcctgtaatcccagcactttgggaggctgaaaaggattgctttagctcagaatttgagactagcctggggaacattaaaaaaactagctggattaggtggtacacgcctgtagtcccagctactccagaggctaaggtgggaggcttgcttgagctggggaggttgaggttgcagtaagccatgatcacggcactgcagtccagcctgggcgacagagtgagaccttgtctcaaaacatctatatctattctgtaatttattccatctgtaatgttatggaatcacagatggaataaataacagaacggatacaactgaggaatgaattagaattctagaaggagaaaatctagaacaaagaaagagaaaaatataaacgaaaaactaagagataagaaagaactaccattttaggctgggcgcggtggcttatgcctgtaatcccagcactttgggaggccgaggcgggcggatcacgaggtcaggagatcgagaccatcctggctaacatggtgaaaccccgtctctactaaaaatacaaaaaattagccaggcgaggtggtggacgcctgtagtcccagctacgcgggaggctgaggcagaagaatggcatgaaccccggggggtggagcctgcagtgaggggagatctcgccactgcactccagcctgtgcgacagagcgagactccatctcaaaaaaaaaaaaaaaaaaatgaattttgatatgacagtaggaattaatctatgttagtggaacaaaatttcccaaattacatgcaacatccctgcttttttttttttttaataattaagagcaactaaactaaaaatactttttaggaatccattttgatgcagtaaaatgtataaaaaggaaagcaagggaaatgaaaacaatagggttcaggatgattattattgcaggaaggcagcaaaatgggatgggggatattatcgttaaatataggttatgatcagagtcttagtttgtggaagattattgcgttaaaaataatccaggccaggtgtggtggctcatgcctgtaatcccaacactttcgttgagagaatcacttgaggccaagagtttgagactagcctgggcaacatagcaaaatcctgtctctacaaaaaataaaaaaattagccaggaatggtggcgcatgcctgtagtcccagataatcaggagactgaggtgggaggattacttgagcccaggaggtcgaggtggcagtgagctatgtttgtgccactgtactccagcctgggtgacagaacaataccctgtctcaaaaaaattatgaaaataaaaaggtaaaaataagtaaaatgggccatgtgtggatgaataatcagcatatgtcttgaataaaagagttatgattaattctgtgtacttgaggtctaatgggaaaaaatgctgctaaacggggatgttagtgcttgtctgagtttgaaatcttgactccaacaacttactcattgggtgatcttggacaaataacttctgtttctctttcctgatctgtaaaataaggataatagctacataatagggctgttttggtattaaatgggtttatatgtatgcctggtacataataggcttgatgagtccttaccatttgtttcaattatctaatgctatggaataaaccaccccaaaacttagtgagttgaaacagtcattttatttatttttcattcagtgggatgataggctgagttggatagttcttgtggttttgtggtttgtcatgcagctgttaagtcaggtgcagctgaggctggaacgtgtgtgatgctttgttttgttttctttcttttttttaaggacacctcgagaccgttgagtaagtgctttgttgtagtcaggtggcaactggggctggaagatgtgtggtgctttggagggtatggctaagagtctgggctcagctgggcaactgcacctccctctccttgtagcctttttgtgtagtctccagtagagtagccagatttcaagcacctccaaaagtacaaaacatgagcctgccaggcctggaattgtcacattatcacctgctgcattctatttattaagtcatagggccagttagggagcgtggttcattgggagccatttttggaaacggtctgcacattataattaatgtttctatctaccatgttgctctaccatgtatgtagttgtcagatttagacactggaaatgtataaatagacagttacaaattcctgtccacttgtagcttatattttacataataaataattaaaatatgtagtgttttggttggtaaaaaggttggtagggaaaaataaagcagggaaggagatagggaatacaagcggttgggagttttagttttaaaaatgggtgttcatatgaggccttgttgacaaactgtcatttgagcatagacaaaaagaaggataagaattagagggcaggctaggagtggtggcccatgcctgtaatcccagggattacagcactttgggaggctgaagcaggaggatcacttgagcccaggagtttgagaccagcctgggcaacatagcaagaccccgtctctacaaaaaataaattagctgggcatggtggcatgcacctgtagtcccaactacttgggaggctgaggtgggaggactgcttgagcccaggaggttgaaaggctgcagtgagctgtgattgtgccactgcactccagcctgagtgacagagtgagactccatcacacacacacaaaaaaagcaaatgaggaagtaggtgatgagatcaatagccacccattaaaagccaggttttaaattttttttttttttttgaaacaatcttgctctgtcaccaggctgtagtgcagtggcacgatctcggctcactgcaacctccgcttcccaagttcaggcgattctcctgtctcagcctcccgagtagttgggactacaggcgtgtgccaccacacctggctaatttttgtatttttagtagagacggtttcaccattttggccaggatagtcttgatctcttgacctcatgatctgcctgcctcatctggggagtacaatcccaaagtgctgagattataggcgtgagccaccatgcctggcccacttctgaattttaaattgtgcttgtttcctatttgacttattttatagcaaagtaaggtaatgggagagggaggaatttatacttgattacagctataagccttttcagaagcatgagggatcttgttatcttcagccagtgtatttactgattgtcttttttttttttttttgagatggagtttcactcttgtaacccaggttggagtgcaatggtgcgatctcagctcactgcaacctccgcctcccaggttcaagtgattctcctgcctcagcctcctgagtagctgggattacatgcatgtgccaccacgctcgcctaatttttggagctttagtagagacggggtttcaccatgttggccaggctggtgttgaactcctgacctcaggtgatccaccttcctcagcctcccaaagtgctgggattacaggcatgggccagcgtgcccggctgatagtcttaaaaaaatttttttttgtccagacgtggtggctcatgcctgtaatcccagcactttgggaggctgaggcaggcggatcacgaggtcaggagatcaagaccatcctggctaacatggtgaaaccccgtctctactaaatacacaaaattagctgggcgtggtggtgggcgcctgtagtcccagctactcgggaggctgaggcaggagaatggtgtgaacccaggaggcggagcttgcagtgagccgagatcatgccactgcactccagcctgggcgacagagcgagactccacctaaaaaaaattttttttttttttttttttttttttttgcgacagggtatcgctttgtcacccaggctggagtgcagtggcacagtcttggctcactgcaacctccaccttgccagttcaggtgattctcatgcctcagcttccttagtagttgggactgcaggctcgtgccatgcccagctagttgttgtatttttagtagagacagggttttgccctgttgcctagtctggcctctgttagaaataaattttcgaagctgcaaatgaatatcactcaaacataaatttaattttctcagcaaggcaattttacttctatggaagggtgcatctcacggatggagcaatggtgagagcacacctgaacaagggaggggaaggggttcttatccctgacgcaggtagcccctacttctgtgttgttcccgtattggctagggttggaccgcacagtctaagctaatactgatgggctattttaaagagagcaggggtatgagctggagtggctgggcgagtagtatggcgggaagaacagttacagaacaggtgactcaggatgactcaggtcaagggaggtgaccaggagtgactcaggatggagcaggtgatagaagctaggagggggttgtttactgaaacgaggggcaaggagatgaagagaatgaggaagttaaacttttaaagttttaaatgaagaacaaagaacaggggagctgaacatacagatacattggttttttggagagcatctcagaactcattgtacttaacaatttacaggctaaaacctttgaagaggaatttattaaatcctacatctcaaactcctgacctcaggtgatctgcccatcttagtctcccaaactgttaggattacaggcgtgagccactgcacctggcctattctagtcgccatttaccctttccctgatgtggcttgttagtcatcagttttaataattgttgccttttgttagaaaaaggcataaatgaaggttaacttaagtttatttaaaaatctattttccggctgggcatggtggctcacgcctgtaatcccagcactttgggaggctgaggtgggcggatcacgaggtcaggaatttgagaccagcctgaccaacagggtgaaaccccgtctctactaaaaatacaataatgagctgggcgtggtggcgtgtgcctgtaatcccagctactcaggaggctgaggcaggagaatcgcttgaacctgggaagcagaggttacagtgagccgagattgcgccattgcgcttcagcctgggggacagcgagactgtgtctcaaaataaataaataaataaacaatctatcttccttctctgtagcttttgtttttttaaggataaaaggtaggtgaaagattttcattgaactttactctgtatttcacttcatgctacatcttttctttgatggtatatgtccatctcggtttaacccattttgtaggtttgtaattgctgtgtttttttctggggttggtacatttacaagctgttttaactggtacttaaaatgttgactcttagttaactttctatggtcctttgtcaagacatgttccaacatgttgtagaggttttcctagaagtcctgttggaatcttaaaacctgtgacttaccttggtaaatccccagtcttgcatctagagagtgctctacctgataaccattggggagataatgatttgactttcagctaaaacagtttactgattaacatcagttggaggttggagcgtgcctgaaactgttactgtttcagccttcacctgagagaagcttggacgattcttactcttaattaaatcagaactagaaagtagtcagaagatatgcagaacctcagcaagggtatacagcatttgtgtacggtgctccattatatgtgtcatatgtgtcttttacttctgctggttgcctttgtgtgaatgctaaatagggaattttctgcattagaatagatgttataaatttttttttctatttagttttaccaacagactgcagtttcttcactaccaaaatgacatcattttccacctctgctcagtgttcaacatctgacagtgcttgcaggatctctcctggacaaatcaatcaggtaaatcattttcggtatttctagttttttggttttttttttttttaatttttaaaaagtttagctgtctcatgactgtaatcccagcactttgagaagtcaaggcaggaagcttacttgaagccaggtgtttgagaccagccttggcaacatagtgagacctgtatctctacaaaacatttctaaaagaaaaaattagctagatgcagtggggtgtgcctttagttctagctacttgggagcctgaggcgggatatcacttgagcccaggagttcaaagctgcagtgaattatgatcacaaccagtgcaccccaggctgggcaagagagtgagaccttgtctcttttttaaaaaaagtaggggaggtgggggttgtgctgggcgaggtgggtcatgcctataatcccagcacttcgggaggcggaggtaggcaggtctcttgagcccaggggtttgagaacagccagggaaacatggtgaaaccccctctctacaaaaaaatacaaaaattacctggatatggtggcgtgcacctgtagtcccagctactctggaggctgaagtgggaggatcagttgagtctgggaggttgaggctgcagtgacctgtgatcacaccactgcactccagccaaggcgacagagcaagaccttgcctcaaaaaacaaaagcggggggagctgtttaaagaggttctcttgttccatagtttcagaaacctacttgaaatgtaaatagcacatttattttatgtttatatcaggtacgaccaaaactgccgcttttgaagattttgcatgcagcaggtgcgcaaggtgaaatgttcactgttaaagaggtaagccatcaaataaaattctcattttttttgttttttttttttttgagatggagtctccctcttttgcccaggctggagtgcagtggtgcgatctcagatcactgcaagctccgcctcctgggttcacgccattctcctgcctcagcctcccgagtagctgggattacaggtgcctgctgccacgcccggctaattttttgtatttttagtagagatggggtttcaccgtgttagccaggatggtctcagtctcctgacctcatgatccatccgccttggcctcccaaagtgctgggattacaggcatgagccaccgcgcctggccaaattctcagttttaagaacagttgagaagtagaagccagtgaatatgtagttttgaaatcaggcctaagaaaggaagttctactcctgaggtatcagaggggcaacttatactctgttttaaagactgttaggttgaacatcatatttcctttcttttgaagtgtgttataagataaacataagatgaaccatgaattcattgatcgtagagttaaaatgcagagcaagtaaagattaaaaagacactgggcctggcaccatagctcacgcctgcaatcccagtattttgggaggctgaggtggagggattgcatgaacccaggattttgagaccagcctgggcaacatgatgaaaccctgtctctaaaaaaaaaaaaaaaaatacaaaaattgggcgggcatggtggtctgctcgtttagtcccagcagctacatgggaggctgaagtgggaggatcgcttgaacccagaaggtgaaggttgcaatgaggtgcactccagcttggttgatagaatgagagaccctgtctcagaaaaaaaagacactgtctgatttacaggctgtattttgaggcaggaattaaatgcagtagtttttattataaatgtgtcagatatggtggctcacgcctgtaatcccagcactttgcgaggctgaggtgggcagatcacctgaggtcaggagttcgagaccagcctgaccaacatggagaaaccccatctctactaaaaatacaaaactagcttggcatggttgtaatcccagctacttgggaggctgaggcaggagaatttcttgaacctgggaggcggaggttgcggtgagccaagattgtgccattgaactccatcctgggcaacaagagtgaaactccatctcaaaaaaaaaaaaaaaagtgtcagacactcttctgagcactgtgagttattttaaacacatgcatttaaataacttatttagcttctgaagttttttaaaaaacaatttgtattctttaagtggaaaagactcagtattaaaatgttaatgttgggaactgctttcatttggtggggtagatatctaacccttcctaaagagaagaaacaaaattatcaggcttttttttttttcgaacttaaaaccttcacacctatcaacactgccacactccagaaccattacacttctcaaggagacaaatctggaggcatttctgattttttagaatacctatattacttttacgattttaaattaagcacatcgttttggagtataaaatttgacacgtaagacctttttttccccaaacttattaaagtctggaattttttttttttttttttagttttatccttttattgaagcttacaatttcactgaacttttggccccaaatgaaaaaaatgcaaattaaaaaaagtattggcaaggagaggtgaccactgtcccctggagatggaagccgagcagagcgtggcaggcaagtgagggatcccagctgcggaggcagtagcctggccaaagatgcccagggaacagatttgtctgagcagggccagccccaggcagctagaagttaatacccaaggatttatgggtgtgatggaatccaagccactggtcccaggggcaaatctctctcatgcttggtcagattccactttggagaaaatgggctcatgtgacaggatggcctggtgagggaacacaggtgctaatggtaacaggccagtgaacactcgccactggcatcagggtggagctcagctgactggacactaactccattacaaggaccagaatctcctgcgtctggtgccaggctgtgccactcaactgctcatggccgtcgggacattcagctttcatcctctccttcatcaggcccctacctgtgtggcctcagccctggtcctcactatttggtggctgtgatgcaggactctcaaccctcttttggaacagtgttgcatcaagcaagggagaatgttcttctagagggacaggaaaagaagagagaggtccacgtacttctgtcactctaggaagccaggaaaggtccctggtgcactccactctccacagatgggttgggtcatagcatccgagctgtcatggtgacgacgtccttgaagctgagccgaatgttgccttgtacagctgtgtccttctcccggaaggcctctgtcggcatctgcagctgggtgcacacctggatgaagcaatcaagctgtctggcaggattgacagagcgtgggcagtagctggagaccagtagctgggtgaactgggggctcaggttgtagcccatttgggacagagcttgctgcagctctgtgtagctaatggagcctgagttgtcccagtcataactgctggaagagctgcttccactgctggatgaatttccacagggctgagaagccgtagacatttatgtggcctgattaggtcttgtcaaacatgtttatcatcatgaggcaggtctcatcattgaacaaggaccagttgcagttgaccagagcctgcttcacctccttcatggagataaagccactgtgatcagagtcaccgactggaaccaggagtaggcctcatccatattgggaggggagccaccctgtccatgaggcctgggctgctgggcaccgtaggaatttggaggtggctgaccataggggccccctggagctgtaccatcatttggtcctcctggagttccagaggggaacatcccaggattgaggtgtccatagggccctctaccagctggtggtccataaggccctccaggggcaggacccccatagccaccaccagggggtagcacgctgccatactgccctccactactggggggggtccaaggtagtagctacccggaggggttcctggcgcttgccctgcatctccagggcagccccgcccatacagatagctggctgtggcaattctgacgtcacacacaggcaaggggtaaagtctggatttttatatcattatagtggttatgatgaattatgccatctccttcatttagcatggcagagtttgcctgagtttacacgatgagctttctgttatgaaccttgactctatctattgcataaagggaatttcctgatttttattatttatttatttagagccagggtcttactctgtcacccatgctggaatgcagtggtggtatctcagctcactgcaacctccgcttcccaggttcaagtgatcctcccgcctcagccttcctagtagctgggactacaagcgtgcctcaccacacctggctaagttttgtatgttatgtagagacaggttttgccatgttgcccaggctggtatcaaactcctgggttcaagcaatttgcctgccttggcctcccaaagtgctgggattacaggtgtgaaccacttcagccgactaaatttttatttgataaacacttggattttatgttttgtccacttacaatgctgatggctcttattaaacattgtacttcatttgccaaaaagaattattatgtgaacacatatcaaaagcctaaagtcgtttatgtgccctggactgggaaaatatttttataatccaggcaaattacttctagtaatagaatagacttctttatttggacgtctgagaaaatttttaagaggatactaggtaaattcactgctttttctcattgtcagatcagttcatttctgtgctgaaaagtctgggtctgttaattgtcagaaagacaatgagtagatggacctagtagttgggagcggctttcctgttgtaggaccccttacacaaactttgacagtcttgtaaatatgttatttctttctttagcaaactaacttaccttacctcctctaatgaatttgtgtttttggtagcagctggacagatcacaacatggtattttattccatgcaggtcatgcactatttaggtcagtacataatggtgaagcaactttatgatcagcaggagcagcatatggtatattgtggtggagatcttttgggagaactactgggacgtcagagcttctccgtgaaagacccaaggtaaaaacagtgagggcttgcgtatctttttgggtgcttatacctagccacttaatttctatgggttattaatatttattacttcactcaacaaatatgtaagagcctacatatgttaggtagcctatgaggcactgagaatatggtaatgagcgacacacagtctgattttatggagtatacagagtagtgagtcagtagatgctcttgcccatcttagtcaaataatcacactaattcatggtaaacctacactatggcaagtgctacagaaaagagatacatgaagcagggagtgggtgggatttagagtgttagaggtcaagaaaatgttcttttgaggaagtgaaatttcagccaaaagctgaaagatagataattaagtagtcaatcagagagtttgaggttgattgaacaccatgtgtaaaggcctgggtaggaggaagcttgatgtgactaggttagaattttgtgaaataattgttggagagggaggaagagtgagcagatgagagaaatgtagaattgctgggcagttagaggttgatgatgagcctggtaagaatcacagtagggctaacctgacctgttacttttctccagctgcatggggtgtaagttattagcttatatagtcaaaagctaattagtaatttagaagctctctttctctatagctttgatgactgctgcttctgagctcattctgtcttacactaagacttcccttagctgggtgtggtggctcaagcctgtaattccagcactttgggaggctgaggtgggtggatcacctgacttcaggagttcaagaccagcctggccaacataagtgaaacgccgtctctactaaaaatacaaaaaattagctgggcgtggtggcgggcgcctataatcctagctagtagggaggctgaggcaggagaattgcctgagtccgggaggcagagattgcagtgagctgagattgtgccatggcactccagcctgggcaataatagcaaaactccgtctccaaaaaaaaaagactcccctccacccccactttccaattacaatgtgaaacttcagtcctggaaggaaggaatagtttccaaaagagatttccccacttggattactgttcgctaatgaaataaaatgtaaattaatcagttttttaatgggggcagagtaacacaggggcctgggcattaacatcttaatatttaaataattaaaaactgttctgggaaaaagattctgcctttgtatgccttacagagagacttgggagataacatcagaaatacatttaatatttaacggcaaaccactgatatcttcatagtggcatttggggttgttaattttttatcttctctctttaacagccctctctatgatatgctaagaaagaatcttgtcactttagccactgctactacaggtatgtcacatcatatttcttcagtctgtatcacagctttgagttcaagggggcaaatgatgggaaaacaaagaagatgaaggtggaaatggaatgctatctttggcatgactgggagaaatacatactacctgtcacacagaatgttatgttattaactttttactgaaaaatcaaacatagagtagaaggatttccactttctagacgtactgttaacgttttgtcatattgcttcatctagacacacttttaaaaatctctagcagataaggacttttttctccaaacattcaatatcattattacacataacaaatttaacatgtaattccataatcctatttcatagccagtttatgtatcatttcccccagttatctcaaaaataccttgtatttttgtcttacttgaattaggatccaaagtccacacattgcctttggttgatatgtctcataagtgtctttaatctataaaacttaactttccttttgttttcatgtcatttacgtgttgaagaaatgggtcatttgttctgtagaatttcccacgctctagagttggcagattgtatccttgtgattttgtttaatgtgtttctttaccctctctatttttggtaaactggtagtgcttgaataaattcaagtttaaattttttgccaagaaagctttataggtaatgctttgtacttctgtttaatcacatcagagtcatgtaaggtctgcctgtctattttagtcagtcatgttaataatctgtgggctcaggtggtatcagtctgatccatctgttacacaggtcactcaagaaccttttacctaatggctttagccatctcttatctgaatgccaatttgtctaaccctttgcttgattctagaccttctaaatactgctctttaactattaggtatgtataggaaactggctgtactggagtctggagtctccaaaatggtggtctgtaagagataggtaaataaactggacagactgaacatagccatttccaaataatgaaactttttccctctccactactacataaagcccttttgtgagcttcatattaacattgccctttgaagaaagcccaagttagtaatctttttagattgaccatctttttttcttctcaggttgcccaggctggagtgcagtggcactatctcagctcactgcagcctggacctctcgggctcaggtgattctcccacctcagcctcccgagtagctgggattataggcacatgccaccatgcctggctaattttttgtatttttagtagagacagggttttgctgtgttgctcaggctgatcttgagctcctggactcaagcagtccacccactttggcctcccagagtcctgggattatgcgtgtgaaccactgcacttggccactgccactgtcttttgatagtttactgaactgtcttttgcactgtcttttgatagtttactgaaataagtaggttgagaagaatccattcctttttatctttttctttctttcttttctttttctttttttttttttttaaatgtagagcgtcttgctctgtcactcaggctggaatgcagtggtgcaatcatagttcactgcagcctttacctcctgggcttaactcatcttcctgtctcagcctcccaaatagctaggactataggtgcatggcactgcactgcacctggctaattttgtttttttgtagaaatggggtcttgctttgttgctcaggttggtcttgaactcctggcctcaagtgattcttccacttcagcctcccgaggtgttgggattacaggcatgagccaccgcccccagacctaaatcaattactaataaagatttattctttaaaggcagagaaagagacattgctgtcataccgaaacatgattttgaacttactgaattttgaagcctgttagtctcattgagtcatatgcccacttcacatagctgtaaatttgagagtgaagatcctgcaaatgatacggcagctttattgaaattcaatcacttgtaaaatagcatggctttcctgcgatagtcactaaaggtttgagatacatggaggattttataattgctgatctactttttcattaaaatttgtttttggattgatctgttttctgaatatctataattctccttttttctctcattttctttcttgtactttctctgcagaatttaacatgccatataaagaatattttgttggttttgttttgttttgtttgagacaggatctctctgttgctcaggctagagtgcagtggcaagatctcggctcactgcaacctccgcctccgtggcacaagcagtcctcccacctcagcctcctcagtagctgggactacaggagtatgccaccacacctggctagttttttgtatatttttttgtaggtacaggttttctgcttgttgcttaggctggtcttgaactccaggactcaagcgatcccccttcttcggcctcccaaagtgttgggatgacaggcgtgagccaccatgcgtggcccatttttattttttaacttgtcgttttgaaaaaatttcagacttaataaagttgcaaaagtattgcatagagtttctctataccctttatccagagtccccaaatggtaacatcttacataataatagtatgatgatcaaaaccagaaaattgccccaagtaattctgattggttatctgttctgacttgcaattgcattggtgcttgtggatggccatctctgttgatttttgtgatttgggttgcttgtgttttatttgaaaggacaaatgagagaagtgcttttcatataattttatacctttgcaaatgggttaaacttttcattttggtcaagaagatgccattgtttaaaatggtagttcttttttttttttttttttgagatggagtctcgctctgtcgcctaggctggagtgcagtggcatgattttggctcactgcagcctccacctcccgggttcacgcagttctcctgcctcagcctcctgagtagctgggactacaggcgcccgccatcatgcctggctaattttttatatttttagtagagacggggtttcaccgtgttagccaggatggtctcgatctcctgacctcgtgatctgcccgccttggcctcctaaagtactgggattacaggcgtgagccactgcacccagcctaaaatggtagttctttctaaattgtctctccaaattttcccatgtatacaaatgaaataaatatgactaactttgtgtgtgtttattaatttttgagactgagtctcgctttgtcgactaggctggagtgcagtggtgcgatctcggctcactgcaacctctgcctcctgggttcaggtgatctcctgcctcagcctcccgagtagctgggattacaggtgcgcaccaccaagcccggctaatttttgtgattttagtagagatgaggtttcaccaggctggtgggttgcccaggctggtctcaaactcctggactcaagtgatccacacacctcgacctcccaaagttctgggattacaggcgtgagccaccacacccggctaattttaaaacttcttttttacattgtggtttcaccagataatttatttttgcttgtaactgttttaacctaagtaaggtagtaaggctttggaaatataaatgacagtaataggattgctttattaaagaattgctcctggcctgtgcggtggctcatgcctgtaatcccagcactttgggaggccgaggcgggtggatcacaaagtcaggagtttgagaccagcctggccaagatgataaaatcctgtctctactaaaaatacaaaaattagtcaggcgtgcgcctataatcctagctacttgggaggctgaggcaggagaatcacttgagccagggaggtagaggttttagtgagccgagattgcgccactgctctccagccagggtgacagagcaagactccgtctcaaacaaacaaaaaaattgctccatctgcattatatgttagtccaacttcgctttgaagaccactgtggtcagaaaatgctgtctctcaaactttttgttgtctccgtttgtccacaaaaatgtttctggaaataatgttttttataattagaattttgaaaatgtttgcttttttcaatagaaccgcattgacagatcagttgtaggatctgtatccttcctctagcagcctttatcagatggtgatgatattttccatattttatctctgaacctggtagtggttggtgaacctgacccacagtagacttattttgggtctatctcattcacatagcctcaaataatgaatagtccagattattaaattgtttgcagcttgatcttttcgtgtagccaagtttttgtcttttgttctacttgaaaaatttctttgtaagtccttggaatgcatttctcttttagattaatgtaatatctaagaatttctctgtactgtgttgttttccttggttctttttattggccttgagaaaaactttatttgctgctgcttcttaggaaatgtttatagtaactgggaaaaataagacaatgaaaaaaattaatttatatacaggtgatggtaatgggaatttaaaccataaaattatccttgacacttagaatgtcgctttagatgaagatgctattgttttatgaagcaaacggggaaaaatccagatttcaagatcccataaccctgtatgacttaacacttgaaagttgaaattaaatgtaaaaagccatacactcttttccttttgtttgtgagttaggcgaatttggtaatatataggaagagatgacaaaaatagactccattatgtcctgcttggaaccagttttcatataaaaatttaaaagcttgatatggaagaacatttttagctatttttcactgttttttttcccgattatattttggtaatatattttggatatggcctgtcttggtctttgtcatttttatcaattttgatttttcccttgcaaatgagagctttgtccagccaacatggagaagtacatttctagggactaaacctggctcccgggttgtttgctgaggtcctttttgtgtggaaagaatggttattaccagggaaggttttccttttgttttacttgctatccagatgctgctcagactctcgctctcgcacaggatcacagtatggatattccaagtcaagaccaactgaaggtaaaatcaccacacggtgacttcttttgttgtacagagtggccccttctctgtacctatggatcttggactcccaagacctttccctgaatgtggtaagaatttaataagaaaggttcttgggagttcacagaccagggacagagtgaaccttctctgttctgcccataacagagttccagtctctgaacctttctttgggatgtagcacttctgatcttcagttcttccagttgcatttttctttgggtttgtgtgtacctgtgtgtgtgtgtttgaggatattgctttattagattttaataggcgtgttgcagttaagttcatgtcaggccatttcctaaagcttccccaaacctggggaaactttatagtcatcttggtacgtggcgagggtttcatatgttttctgaattatgcctaattttgtagtagactggagggtttatacagatagcctgtttttaacagtagattttggcctttgtgcagaggttttttttccccccaggtttgggattcttctagctttgctcacagtgggttgaggagaggtgttgcctttatttgatgactgttgtgaacttgagttctctttcttgtgtgtaacccattgtgttgcacactaactggtgagccagaatggaactgctacatcccctggtctcagttatttctactgcactgatggacacctttcccttctttcagcaaagtgcagaggaaagttccacttccagaaaaagaactacagaagacgatatccccacactgcctacctcagagcataaatgcatacattctagagaaggtatgttttggattaaggctatatagacttttgttctcttcctcttccaacctttttatttttaatctctccgtatgtgaagtaggagagggatatgtcacaatttctcatccttttctgaaaacctttttatcagcctagttactaccattgttagctttgaagaggtagtgctattttagcaacccgtgagtactaggatggtgcaagacccttccatgagctagcatgctactagaaaatagctacacatttattgatttgctaccaggtgaattttctacatacatgaattcagctgccttagacttttcaatcttagtattcttgtatgtatatgatttggttagaatttttattttgatttatctacttgaggcaaaggccaattttcatacttttttttttttttttggagtcagagtttccctgggtcacccaggttggagtgcagcagtgcgatctcagctcactgcgacctccacctccttggttcaagtgattcttgtgcctcagcctcctgagtagctgagattacaggtgtgtgccaccacgcctggcttttttttttttttttttgagacggagtctcattcttgttacctgggctgagtgcaatggtgtgatctcagctcaccgcagcctccgcctcccaggttcaagccattctcctgcctcagcctctggagtagctgggattacaggcgcacgccaccacacccggctaattttgtatttttagtagagatggggtttccccacgttggttaggctggtctccaactcccgacctcaggtgatctgcctaccttggcctcccaaagtgctgggattacaggtgcatgccactacgcctggctaattttggggttttgccatgttggccaggctggtctcgaactactggcctcaaatggtctacccgcctcagcctcctaaagtgctgggattacaggcgtgagccactgcacctggcccaatttttacacattttgaagtttgcaaagatgacataatatacttaatcacaaagccaagaatgagatataagaagcctggtataagttgagcactctaaatttgaaatgttgagcattctcaatttgaaagattgtaatgctcttttagcaactcatgagtactaggatggtgcaagaccctttcaaaggatcttagaataagttgagcatccaaaatctgaaaacttgttttttttttttgttttgttttgtttttttttttttgagacagggtcttgctctgtcaccaggctggagtgcagtggcacagtctcagctcactgcaacaacctccacctcccgtgttcaagcgattctcctgcctcagcctcctaagtagctgggattacaggcgtgcaccactacgcccagctaatttttgtattcttagtagagacggggttttaccatgttgaccaggatgggttgatgtcatgacctcgtgatccacccgccttggcctcccaaagtgctgggattataggcatgagccaccacacccagcctctgaaaactttttcacatgacaccacaagtagaaaatttaacacctgacctcatatgacaggttgcagtgaaaacttagtttcatgcacggaattatttaaaatattacaaaaaactgtcttcaggctatgtgtacaaggtgtacatgaaaacttgggtcccattagccgggcgcggtggctcacgcctgtaatcccagcactttgggaggctgaggtgggcggatcacgaggtcaggagattgagaccatcctggccaacacggtgaaatcctgtctctacttaaaaaaaatacaaaaaattagctgggtgtggtggcgggcgcccgtagtcccagctacccgggaggctgaggcaggagaattgcgtgaacccaggaggtggagctagcagtgagccgagattgtgccactgcactccagcctgggcgacagagcgagactctgtctcaaaaaaaaaacaaaagggaaacttgggtcccatccccaggatatctcattatgtatatgcaaatattccaaatccagaaaaattgtttttgcccttggatggtagtcaccagatctttgccattccattagatatgttgtggtcaggctaatgagttcatccatattttccccaaaactctaaaaaacactttctaggctgggcatggtggctcatgcttgtaatcctagcactttgggaggctgaggcaggcggatcacctgaggtcaggagttcgagaccagcctggtcaacatggtgaaacactgtctatattaaaaatacaaaaattagccggacatggtggcaggcgcctgtaatcccagctactcgggaggctgaggcaggataattgcttgaacccgggaggcagaggttgcagtgagccgagatcgcgccattgccctccagcctgggggacaagagcaagactttgtctcaaaaaacaaacaaaaaaaacactttctaaaattagttttttgtttctgtttttgtgttggcgaagatgtgtaaaatcataaattccccaaagtcattttatggcatgatggcttctagtctaggcatgtggaccaatggcaggttaagcctctagttatgtctgagaaactttggctgctgaagttattttaaaagcttaaatttgaataagtttatcatgctggattgttttctttacattgcatttgagcataaactgaattttggtctacctagttactttgtaactattccagtctatatgatattaaatgtgtaattttattccttaatgcaaatccttgcttattttgtactcaaaaggcaattttaagatatataagaacatggctgggcactgttagaaaatcaaggctgggcatggtagctcgtgcctgtaatcccagcactttgggaggctgaggcaggggcattacttgagctcaagagttcgagaccagcttgggtaacatagcgagacctcgtctctacaaaaaatcagcccagtagaaaattagctgggcatgatggtgcgcaccagtcgtcccagctactcaggaggctgagatggaaggatcacttgagcccaagaggtggagattgcagtgagcggaggttgcagtgaatcaatatcatgtcactgcactccagcctgggcaacaaagtggtgccctgtctcaaaaaaaagttgggggcaagggcaggtatttaagaatagccaactcaaggggggatatgtagtttgtgatgaaaatttgggaataaataatagtattttcaggaagacctataggtagaagggacagaatttttatttgtggaaagaatgacctattttcatttccttcataagttgtagagctcgagtagggaagaataactttaatatggcaccatttcaagaatttggcttctgatagtttcaataatgaataagtggaaacataattgaagtttccctggccacagataagccttttagtcagcaatattgacataatttataagtaaatagggtaaccttatgttctggcaaggacccatgtattgcagaaattctttcaccatatgtacttcagcacacgttaaccccatggttgctatgggcaggcctaatgtattgggaggaggtagaagagaatgagaaagtaagaaaggagcagtagagcccaacaaaagactggagtatgggaaagaaaagagtatcatgtgataacaacagacttatgttaattagctgccctcagtgtcattcaaatgtacaatgtgagatcttttacttgaaataacgtggggtcttagtatttgtggtatgtctagatacttaactctaagagcccattgatccagcgagggcatatgtatgtatttggacaacctagagtttagtgttttatagtggttgttacctactaaaacatacgaattattgagaattgacccagaatatgtggtaccagtgagattgcctggacaaccttgtgatcacctattatggtttgtattgccttgctttgatcttaagggttagaccactatgttaccatcatttgcaatgctgttaatcaaactattatcaggcactatgtactagagcaagtaattctatagtttatacatggtaggagtgtttaaaataccagtaaatgcccatttagaaattcttttagcacaaggtcattgttcagatgcttttagagtcttttttttttcctgtcttctcatagaagacaatgcttttagagtttaaacttgataaacgatgatctgtttgtagtgtcattacttgctaatgaagtctaaacaagggaggagatttgagctctgccactaagacagatacttgatttctggttctttctttcttagaacaggaatttctttttacctattttataaagaagttttaagtattctaaagatagtcttagttattacgtattgtgcatagttatcattcttttcatttgacttctatagatgaagacttaattgaaaatttagcccaagatgaaacatctaggctggaccttggatttgaggagtgggatgtagctggcctgccttggtggtttttaggaaacttgagaagcaactatacacctagaagtaatggctcaactgatttacagacaaatcaggtaaatttcacatttgaagggaagtggttttttttcttttgaaagggtaacattcttggttactcttgaccacacattatattctctaagaattcttatttactcctatggcgttaaataccatctgtatgcatgtgatacccaaatctgtatctctagtccttacctcttccctaaatgcccaacttcagtttccagatgcctatttaactaacaactctacttagaggatttgacattgaacaatttcaaaatggagcctttggctgtgcgtagtggctcatgcctgtaatctctgggagtcccagcctataacactgggaggccgagacaggaggattgcttgagcccaggagtttgagaccagcctaggcaacatagacaccatttttacaaaaaattaaaaattagccaggcgtggtggcgtgcgcctgttttactatagtaataactgattcagccccctccttcctcacttcctgtcattcttctttgttcactacatgcgttttggatatactaggctcctttctgacactgtagcccaaaattgctgccttcctcaggcaccttaagtttgttctttactctttctggaacactgttcccccacattctttctttgccttctcatgatttaggactcacctcaaatgtaatttcttcaaagaggtcatccctggccacaaaggctattatgttacacagttccagtaggatccattcgctttttgttttggagctgtgtagctataggtggtggccctgccaaacccatccctagttaaaatagcctcctctctagccactcttctcttttatcctattttattctccatagtacttctcactttgtaaaaatattgctatattttatgtatgtgttgtctgtttaccactgaaatgtaaggccagggcttttgtattattcactactttttccattacctggtacctagaacagtatgtggcacataataggtattcagtgagtatttgtttaataaatggatgagtatttaatagtgtgcaaaataataaattgtctctcatgaatgttgtagaaaagcatgtcatgaaatattcatagatgaatgcagaaggttagttctatatggagttcagaaagtgtcaggacaaaaggtttgggtgaccatcagtatttctcatatttctttaataaacatccttgaccattttaagggaaagaatatgtcagaactaatggaatgttttgtagcttcttagagtgtcacctgtagaagggaatttagggaatagattctatttacttgagcaactacaagtccttaccttttaaactcttcagtactgtttcttaggtgttatacctgatttagtgttaaaagagaaaagtccatgcctgacaccattatatccatccattagtttatccacagtaggtgtcaagtagatatatgttgaatgaatacatgtccactgaataaaggcaagatgttctttggcgatgtagtgtgacgacattgagttttgggttcatttgtgttgtttcaacatctctgataaacctctgaatacagaaactcatgtttgttttttttctgttaggatgtgggtactgccattgtttcagatactacagatgacttgtggtttttgaatgagtcagtatcagagcagttaggtgttggaataaaagttgaagctgctgatactgaacaaacaagtgaagaagtagggaaagtaagtgacaaaaaggtatgttgtggaaaaattccatgttgattctgtttgtgtgctcatagtatcatctgttgagatttctttgtatctgtttttacaacagattgctcacataatcccctttttaactttaattaatttttcaatccaattttaagattcacattaagtaatgttaaccagggctgccttaaaagcccctacttagtcaaaagcagtaagctactcttttttcccctgattatagcaacaagctaccttttctctccctttgctaacaaggtaaggtgctaatcaagcttgtccaacccacagcctgtggaccacatgcggcccagaacaactttgaatcaacacaaattcataaacttttaaaaaacattatgagttttcttgcgattttttttctccttttagctcatcagttatcattagtgttagtgtattttatgtgtggcccaagacaattcttccagtgtgacccagggaagccaaaaggttggacacccctgttgtaaatgaacagcagtctgtaggagaaaacttatttcttggaaatcttgatagcttccataaccatgttgtacctaaatggaaagataagattatttctttgtagctattttagtgttaaaatagtagaaaagaggggagattgaactctgagtacatacatatggtatgtactcatgaagtactcatgtgtatggtatgtactcatgtacagatgaagagtcatacaggcaacttgctcaagactcagaagaaattggggaggagatccagtggccagcatgtagaagagtgttggtaaacatccatcggataaatacagcaaagaaaaaattgggtcatcctttttagttatttaagggattttcataagaattttgagttcctgaaggataccctagtatattcgttgtagtcaaatggtacctgggttctcttagactagttatatgggtagcattagaaggaatgcaggtggcttgaattaagacaaaagtgacatttggaaacttttatttatttatttttgagatgggatctcactgttttgcccaacctggtcttaaacttcttagctcaagtggtccttccacttcagcctcccaagtagctggggtcacaggcatgtgcagccatacctggcctaggaaacgtctatagagagagatgggacttaaaatacttggccatttgtgagaaggttgctgtacagaggttcataattgtttcataattggttttattctttttattggaccacaaaactagggctttaaatttttaaattctaaattttaaaatttagaacactccttacttttgaaacggactttttttgtttgtttctgtttctgtgggcatgtttttataggacagccagagtatcacataactagtttcacttttgaaagtgaaaagtaaatttttaagatactttgtttcattcttcctgtctgcttagataaaaaattgcacgtttaacaatttggagcttttctactctgaaattatttatttatttatttttaaattgttttagagacaagctcttattctgtcacccaggctggagtgcagtggtgagatcatagcttactgcaagccggaactcttgggctcaagcgattctcttgtctcagcccccaagtaactgggactacaggcgtgcaccaccacacctggctaattttttttattttttgcagagacagggtcttgctctgttgcctaggccagtttcaaactcctgggctcaaggtatcctcctgccttggcctcccaaagtgctgaaattataggcacctggctgtaaaatagccaccatgcccagctattttctttaaagtcataaatatgggcatcttctctcttctgaatgcaaaatttatttggtaactcttctgggtgcttttctgtcgtttgtgctactactgaaatgccaactagaagtacagaatcatgtgtttggtcttgcatttaagctgtctccttaagtgctagagatgggagaagaatgtgagttttaaattgaagcagttgtcttttttgctttcagttaattagcctcatctaaaacaagtaaacattactaatgagatgtttttgccttcacaggtgattgaagtgggaaaaaatgatgacctggaggactctaagtccttaagtgatgataccgatgtagaggttacctctgaggtatgaatctttagcaagaactattttgcaccagccccatcttcagatgatgtaatcccagcagttcacttgtgttgaagagtgctgtttacccctcatttctgtctcccttgcctagttgctaagtgatgttggtttctttacatttttttaagagatttttattggaacttaagaagggaaggggataatttgatcttatcctctccctaccttgaaaaggatgagataaatgcctctgtgtgcctttctccctgccatcaaatctctctggagacacaaagttattcaaaatagtcttgcactgctttccctgactcaacacctctctgcaatcccaaagacagacccataggctatctaaaattatttgttgaatataaaaataatattgtcattgttttcttaaaaagaagcaaatggaaaacagcttaatttccacacagattagtattaatggaggactattaaagaagacttgatattccactcttaggttaatagggatggatttgtcactagttgacaactcaagtctagacccaaatgtataccttgcttttttgttgctatttccccatgtttcttttagtcttgccacaggtaacacactatgggaaaaaggttggtggaggaaggataagaaggggattttacattttgctgcttggaaagagaaacatttttaggttgtttctggtgttgatccttcccccattcccaccacaccactgttgagcattatggtagttcattgccaatgatctgtgtgtagcttagtaataaagtaaaatatattggtccagtaagtgttcttgactgtaatacaaataacagagataaatgtttccatctgtttttttgagatggagtttcactcttgttgccaaggttggaatgcaatggcataatctcggctcactgcaacttccgcctcccggcttcgagcgattctcctgcctcagtctcccaagtagctgagattacagacatgtgccaccatgcccagctaattttgtatttttagtagagacgaggatctccatgttggtcaggctggtcttgaacttctgatctcaggtgatccgcccgcctcagcctcccacagtgctgggattacaggcgtgagccaccactcccggccatgtttccatcttaatcagacttctgtggctacttgggtgcagaaaacctattaagcaaatggactgtatttcatcatatcaaagatgccattgaatttaataagccctattattttatgtcctactaagaaaaagtgatgccaattaaactgtggcacaccatcactcatgaattccaaatctttatgaagttcctttgattatttgtatagcattttaaatgagattggaagatcttagactggcaagagtgttttgaggccatctggaatcccagtttaacacatggttgtgcccttgcctcagtctggacaattgagttatgacttctagacttgaagtgcttggcctttgacctaaaagtaatcaagttcagcttatgtcaaatcaaatcctgtcaaagccagttaaccgcattaaatattctttcttgttccctgtagctatttttgaattaagcaaagcatttaaaattcattgagatctagtgtctcctaatttgaatatggagaagtagggaaaaattacttggcattcaaggacaataacatttatttttcagagggcatgatttaggcatacagttacacctataattctgggtgcaatgagagtgcatgagtaaatttagtcgttttcaaatctcatttgttttagctttcttttttgccaaactttataacatttgctattagtgtagaaaagaatgacagagtattctcttcattcttcagcctcttgcccgataaaggagtaagttgtgcaaagaaaaataactccaaagaagcccataaggtacagcaaacaatgtaaatttcaccgagatgaggtagaaagccacctttcttaaagccactttcttaaagataactatatcagattttggcttgaaaatagcagttgtggcactatcagtgtaaaccttccaaagactttccttcatgtggctgtagaatttgctcaaatcctaggctagatcactggtgtggaatagcttagtgagaggatgtgaatgaatttgacctcctttcctttttctcagcatcatattaaccccctgagtattaattggcttcacttgtctttgtaggatgagtggcagtgtactgaatgcaagaaatttaactctccaagcaagaggtactgttttcgttgttgggccttgaggaaggattggtattcagattgttcaaagttaacccattctctctccacgtctgatatcactgccatacctgaaaaggaaaatgaaggaaatgatgtccctgattgtcgaagaaccatttcggctcctgtcgttagacctaaagatgcgtatataaagaaagaaaactccaaactttttgatccctgcaactcagtggaattcttggatttggctcacagttctgaaagccaagagaccatctcaagcatgggagaacagttagataacctttctgaacagagaacagatacagaaaacatggaggattgccagaatctcttgaagccatgtagcttatgtgagaaaagaccacgagacgggaacattattcatggaaggacgggccatcttgtcacttgttttcactgtgccagaagactaaagaaggctggggcttcatgccctatttgcaagaaagagattcagctggttattaaggtttttatagcataatggtagtacgaacataaaaatgcatttattccgttcacttaccacattatttgaaaatcaatcctttatttaattttatttccaacctgtcagagaatgttcttaggcatcaaaatccaaggtagctgtaagaaaaatactggagctaacaatgaagaacagaagtaatctgattagtcaaattattaagtgccatggattactttatgcagcagtcaggtacatagttaggtgaacccaaaagaaaaactcttgaaaacaagagatttcttccatgcacatttacaatattgaggtataattaacatgataaagtgtttccttctaacgagttgtagaaatctgagtaaccacccaaaaaagcaatagaatgtttctgtcaccccaaaacactcccttctgcccctcttcagacagtccttcagctatttcatggctctcaccctagttttttttttttttgcacttttttttttccgggggtataggggaggtgtggggcgacagggtctgtcttgttctgtctcccaggctgaagtgcagtgcagtggtatgatcatggctcactgcagccttggtttcctgggcataagtggtcttcccacttcagcctcctgagtagctgagactatagactagcataaccacactggctaattttttgtggagatgaagtctcactatgttgcccaggctggtctcgaactcctgggctcaaacaatcctcccgcctcagccttccaaattgctgggattatagtcatgaggcacctagtctggcccttttgcaagactttaatctgaaatctaaatttttaaaatttaagtacttacaaaggatatactatccaacatattgcatattatatatgtgctttaaagtttttttttttttttgagagacggtctcactttgtcatccaagctggagtgcagtggtgcaaacacggcccacctcctgggctcaagtgatcctccagcctcagcttccctcacaggcattcactatcactcccagctaattaaaataatttgtagacggtgtctcgttatgttgcccaggctggtctcgaactcctgggtttaagtgattcccccgcctcagcctcccaaagtgttgggcttacagccttgagccactatgcttggctcaaagatatttttatgaaagccctgggactatagatttagctgattaaatttatagaaaaagtcctgtcatataaactggcaaagtctgttcttaatttaattagccaaatcagacttaacttccgtcagaacatgtcttggttttaattcagataaacacacaaacatacttctctggcacagccttcagaagcatcagtttttgttttgttttgttttgttttttgagacagggtcttgctctgtcgcccaggctggagtgcactggcacaatcacagttcactgcagcctcgacctcccagatccaagcaatcctcccacctaagcctcccaagtagctgggtctataggcgcgtgccaccaccatgcccagctgaattttgtattttttgtacagacagcattttgccatgttgcccaggctggtcccaaacttctagcctcaagcaaccctcctgcctcagcctctcaaagtgctaggattgcagtcctgagctactgccccctaccctctttgcgtcttaggagtcatttagattttttttgatccttttgtttagtgcctctggagctgcttacaccaaggcaatacgccttgatatactggatggttgagaggcagcctctttttttttttttttttttttttttttttggaggatagggagtatggctgttgtgaaaagggaggtaaagagaaatggtagatctgaagaggcctcatcagagcacatattttaggacaacacatatggaaattggacatctttaagttggtttccatagagctatgcatgtatccttacccccatgggaaaatgttggtgtgttctcaagggtatgcatgtgtcattttgaagaccaaggccctagaattgtcaaacttaaggatcataaaaatcatgagggttgcttgttaaaaatgtccaaacgtgcagagactgatctttgagatctggaccaggaatttgcatttgaacaagtgttcctggaatctctatgcaagttttatacagaacatacttttggaatccttgccctagacaggggtgtccaatcttttggcttccctggtccacaatggaagaagaattgtcttggaccacacataaaatacactaacactaacaatagctgatgagctaaaaaaaaaaaaaaaaaaaatcgtggaccgggcgtagtggctcacgcctgtaatcccaacactttgggagatcacctaggtcgggagtttgagaccagcctgaccgacatggagaaaccccatttttactaaaaatacaaaaaattagctgggcatggtggtgcatgcctgtagtcccagctactcaggaggctgaggcaggagaatcgcttgaacctgagagggggagattgcggtgagctgagattgcgccattgcaccccagcctgggcaacaatagcgaaactgtctcagaaaaaagaaaaaaaaaatcgcaaaaagaaaaatctcataatgtcgttgttggtttttttttttttttttgagacagtctcactctgttgcccaggctggagtgcaatggcatgatctctgctcaccgcaacctctgcctcccgggttcaggtgattctcctgcctcagcctcccagatagctgggactacaggcacataccaccatgcctggctaatttttgtatttttagtagagatgggggtttcactgtgttggccaggctggtctcgaactcctgacctcatgatccacacacctcggcctcccaaagtcctgcgattacaggcgtgagctaccgcacccagccaagttgtaatttttaataaaacttaagaagtaaacattttacttatgtttataggtatttgatcctaaatttgacacatcattgcccatgaaagaatcctcttaggctgctcagcttcactcttcctgcttgcccaccggggtttttcactgcttctgttagcactaagtacttagacgatcctaagatatgtgcttgagccgaatttcatctttacttgtaggaaactttaaactatttcttttcttttcttttttttttttttttacttgagatggagttttgctcttgtcgcccaggctggagtgcagtggagtgatctcggctcactgcaacctctgcctcccgggttcaaatgattctcctgcctcagcctcccaagtagctgggattacaggtgtgcaccaccatgtctggctaattttgtatttttagtagagatggtttcaccatgttggtcaggctggtctcgaactcctgacctcaggtcatccacccacctcagcctcgcaaagtgctgagattacaggcatgagccacagcgcccagcttaaactattttcttggtctgtttttgattttcttttttccttgccactgcggtacagattttttttactcactgccactaaactaaagcaaggcatagtttatatgtgaagtgttcagagtttactgctataaggaaacttccaaatactgacatttaccttttagctgtagttattgggaccatgtgctctggttttctggagactgccaaattgctcccatttttctgcatcccacctggtttctttctgcatgtcccctttcactttcaaacctcttcatttggatgttaaattatatggtcacctagttataggtaagccttgttcgagttgatatcttgattgtgaggaaggatctgtgtcattggagcttgtttctgctgcaacgtgctgtagactatgaataatgaaatcacaccacattaccatcagatttcttgttttagttgtcaaattaatatttatgattgttatcttgggcgaaaagttcagagcagagatgacaaatcattagaacaacgatgaatttcagtattacggctaaaaagttcttctgtctgaatattaactcactctccttccagtgtacttcacagtaattggtatgcttttttatttaatgcttaaatcaaactttataaaaatcttagaccagatctttaatatggtatgccatttccccagtctaccaatggaatagtatgggtttctaatcctaggcttgtacaatggattggagttgagccatgccagcctccacactgccactaacttctgtaatgtaagattgagtcactgccaagcatttgaaatatgcagttgtgttttaattataatttatgtatagttagatgtatgtagtgcattgtgtggtattatttggtttgtaagaatttatttttaagggtcaaggtcatttgtaacattttgtgtgtgtcaattcaatgcaatgttggctgccttttgaagtctttgatatattggtgaatattcttctgatctataatacaaagctatgtaatgttacctcttgactcgcttttgaaaggaagacaattgttaactagatatttgagttttttcccctcagaattatgtgaatttctgatatatggctttagatactgtgaatctgttttccatttagtcagttatctgcttaaattgttcagaactatatcctaacgagcaattagttctgatggttctcccagtcatgagtgtgcatgtgtgcaagcatgttttgatcctgatgctacctttgctaaaaatggccatagattaggaactagctatgtttttagaatcaaagatgaaccggtaagctgtctcatgtaccaaacgtgaaatttacagtgtttacaaatgtctggaattttgcactgccatagggaatgttaaggttacttggctggaatttatcagacttgtgagtaaacaagttgaagtttagcagatgagggggaatattgaggcccctaaggctaaacaaaataatcagtatctgagatagtggctaatgtggctccccaggcctaatttgggaacagtttttcctgattgctttgagaagtactttcttttgacagaaattttcattctgcttgccattgctatattctccctttataggagccattggatttctttccttttgtgggaaatgtcccattagcattttcagatcttttgatgtgcactaatgccattattggtaatgccgttattggtgaatacagcatagttaaataaactgttacagtaaatctacacttggatttgctgcacctctaccaatagccttttgaatgactgaaagtgttaacagagaaagaggcatgtctgcagaaagagatagctaatattttttggtactttatctgaaatccaagatgctgcttcccctgcaggttgttttccttcttacgatcctcattgaatcccctctgggagcacaggacagttagtagaactctccatttctttttttttttttttagacggagtctctctctgtcgccccggctggagtgcagtggcgcgatctcggctcactgcaacctccgcctcccgggttcaccccattctcctgcctcagcctccctagtagctgggactataggcgcccgccaccacgcctggctaatttttgtatttttattggagacggggtttcaccgtcttagccaggatggtcttgatctcctgacctcgtgatctgcccacctcagcctcccaaagtactgggattacaggcgtgagccaccgcgcccggccggaactctccatttcttaaggtaaagagggtcaaggatacctaaaaagggtcaaataatgctagaagagcaattcctctttcagagcagttgctgtaatttggcaaatgctttatcgaagattgatattaggctaggggcggtggcttacgcctgtaatcccagcactttgggaggccgaggtgggtggattgcctgagctcaggagttcgagaccagtctgaccagtatggtgaaaccctgtctctactaaaaatacaaaaattagccggtcgtggtggcgtgcacctgtagtcccagctacttggcaggttgagacaggagaatcgcttgaacctgggaggtggaggttgcagtgagccgagactgcaccactgcgctcccacctgggtgacagagactctgtctcaaaaaaaaggacatttatcattataacatcttattagagcccctaatttcttatctgaaggcactgtttttttttttaaacagttaagtactgatgtcaacagacaaatatttctgatcagatagtcccctgtcaacagtagcaaatgtggtttcataaagtgggaagaaaacagcattttaaagtaactttttgggagactgatttgagtaataataaaactctggtctcccttaagaaaaaaaaacccttccacctttactgtgtcatttatatccccttagttccaaagttaattatcttatttctggatattgcttttataccaaagacccttatcagcccttgtaactacagtatctttagataagattcctctttccagtcagtcctgggaaatgtttctgttgcagagttaggcggtagatgggaagctgtgatggcagagctactatctaataaagtaacaactcgtagttgaggcttcctttctgtgtgtgatgggggatagggagttagctcccctgttgtctcagcactaagaaattgaggtcaggccaggcgcggtggttcactcctgttattccagcactggggtggccaaagtgggcagattgcttgcgctctggagctcgagaccagcctgggcaacatggtgaaaccctgtctctaccaaaaatacaaaaaaaaagctgggcatggtgggtgcatgcttgtcccagctactgaggaggctgaggtgggaggatcgcttgagcctgggaggtggaggttgcagtgagctgagatggcaccactgcaatccaaggtgggtgacagagacgctgtctcaaagaaattgaggtcaggcttccttcttacagaattatttttttctctgtagtttgcctcattttttcactttcttttcaatgagaatcgaagtgtttcttttgggtttttttttcccccttttaaaatcaacaggaaatgtttcaaaggagggatgaaatgcttcttggcttcctcagcacttggcaaggtagacctcatagcaaccttgaatatgactttctttagtctctagctatgcactattaagtgcctcttgggtagaggtagagttaagtattgagtgccagtcttgacgtccgtatgcctcagtttttctcatatataaaaagcagtatacatacctacccttttctacctcatcatttgttgtagggattaaatccgggagagcaattctgaagcctataaatttccttgaagagatctaagaacctattatgctcttggtgtaccaagctctggggtatatattcagaatacctcatgttctggaagctgagcactagctcccctttattgcctgcctggcagagcctgtttgattactgcaggcccttttacccatgcttctagtttaggtattctttctttgatatgaggctcttgaccagaaaagagttctttctctaggtgttctgagagaagtttgtaaatttggatagtacattctatcctgataaaaccaccttgctgtggtcttgatgtacaaaaaaaaattttttttttgagacagagtcttactctgtcacccaggctggaatgcagtggcgcaatcttggttcactgcaacccccgcctcctgggttcaagcgatcctcctgcctcaacctctcaagtagctgggactacaggcgtgcaccaccacacctggctaattttgtatttttagtagagacagggtttcaccatgttggccaggctggtcttgaactcctgacctcaggcgatctgcccgccttggcctcccaaagtactgggattacaggcgtgagcaactgctcctggcccaaaacatctctttctacatacacttgagtaggtggcataaaatgcactgtcaatatatagaaaacatgaaattttccaaatatttccgatcagagaatcacaagagcagcaaatgtggtttcatcaagtgggaagaaagcagcaatttaaaataactttttgggagactgaattgagtaataataaaacttcagtctttcgctaataataataataataataataataacaacaacttattgaatgtggccagctcactagatgaggaaagaggaaggcattttctgcattcttgcctagttttccttataagcaccactaagttaatagctctgtctttttggtgtttgcactatgtaatgcttttaatactttttaattgtgcttttttatgtattaaatgtttttccttttgccattgtgtgttgtcattatttttgaaataggtaattttgtgtgtatacagttaaatctcattgctattggatcttttggtctgatagaccaaagatacaacagaaaattacttctgttacttctttggggaaattaatggacttaaaatcagcagcattggatattttcccccagttaccttttagagcaattgctatattttattttcagggtcccaatcctgaagaaatccatcaaattttacagagtattttctaacattgagctcgttgtggttttgaattggggctagtacgagaggtactgagggtttgtcacaccatatgcattaatcagttggtatgcctagcatctgctagggtctctaatggcggttcttaaactttggggattatagtcctccttgaaaagctaatgaacctcatgaaacctcttcttataagtagcacaatattaaacatcaatttcagggcttcattgaaaccactgatccatgaccctcaggttctgttctttggcaggatgccaaagaagagtgaatggcccacaaagagcctggtagcacatacgcttttcaaaaggtcatgcacttacagctaaagccattaaggtgagtgaaacatctggctagttgtcctgagcttgggtaggggcaggattaccatatagttggtgcagattgctgtgaactgtataactcttggggcactgttcataggctgccatataaatgatcctttagagatgtgtaatatatatctgaggaggccttgggggtggggtggggtgataatggacataccatcgtaacttttttttttgatacagggtcttgttctgtcacccaggctgaagtgcagtggcgagaggttcacggcagccttgacctcctggctgaagcgatccagccatctcagccccccgagtagctgagaccacaggcatgtacaccacgtctggctgaattttttgtgtttttgaagagatggcgttttgccatgttgcccaggctggtcttgaactcctgggcccaagtaatcacccacctcagcctcccaaagtgctgggtttacaggcaggagccaccatactgggcacccagggtaacactttttaaatgaaaacaaaacaaggagcattagaaacaaaaatggggccagcttctttgtctacttaagcctttcacattttgtatgtgacctgtataaggtactctaatgcaatttcaatggcataacgtgtttcctggggttttccatcctgctcaccttgagttcctggtgctgtagatgtatcatttttgttgaatgtattcttgatactagaagaagaaggcaagctgaaactggtaactaagcttacagagtattgcagttttttttggaaatagggtctcgctttgtccccccaggctggagtgcagtgatgcaatcacaactcaccacagcctcagcctttaaggctcaagtgatcgtcctcctcagcctcctgagtagttgggaccacaagctcatgccactacacctggctaatttaaaatattttttttgtgaggaggtgtggtcttactgtgttgctcatgtttgtctagaactcctgggctcaagcgatcctcctagctcagcctcccaaaatgttgcttttgcctggcacaattgttagtaggtaaatttcacatcactgtttgttttgagggtttgggggttttttgtttgtttttggtggagttacacaagtccatcatataaaggtatgaaaagagttattgctattaggaaaaattcaagtcattataggtttgggcatacagggttaaccttgtgatgtacatccccagccctgaatttatttgattaatcctctttaaaataaaggattacattcaatcaatttgttaaaaacttcagccgaattaaatttagaggagtttaatagagcaatgaacgattcacgaattgggcagtctccagaatcacagcagattcagagagactccagggatgcctcatggtcagaacaaatttatagacaaaaagagggaagtgacgtaaataaataggcagtgaagtacagaaacagctggctggattggttacaggtgggcgtttgccttatttgaacacagtttgaacactcagcagtgtatgagtggttgaagtatggctgctgggattggccaagactcagctattgttacaggcacatactcgtaaattaggttttcaatcttgtctgcctattaagctaggttacagttcatccacagggactcaaatatgtaagtatggagtccttctcaggccatatttggtttgctttaacaaataaatacttattaaatgttaatatgagccagagactggttgatactgagaatacaacagtaaggaagctgctctcaagttgcctatggccagacaatggagttagatacttaagacggtttccacatgagccaaggaaacagtagctgaaagaactaaaggagagagaatggcttttggggggaactcttaagtgtttgttgtgcctggagcaaatgatgtgcttggaaaagtgatgagagatggtgctggagtgggaaggggcctgggtgttgaaagtgtgatatgctaacctagtaggtttgaatgttatcctgaaggtagtggagagctacaaaggtcttaagcaggagagtgacatcatctcattggcatttttgaaagatccttctggctgcattggtgagagtagactggagtgctgtttagagcagggataacagtgaggccatggcagtaatctgggctgcattgatactcctaaagtcatggcagtgggctgggcaagaatagtaatagatgcattattgtaatagaacacttagtaggtgctgacttgacatctgttattccatgaggcatttaaggctcagagatgttaaatagcctgtcaaaggcaattcagaattgcagatagtcagtggttaaacccagtatgtttgagacaaaagcccaaaagaagtgcaaggatttgagagaaatcaaggtagaagagacagacttcatgacaatgcgtgcactttaaacaatgtatgtttaaagtgaccatcgtttttagaaaaaaaaagatgaataaatgtggtttgagggaagcagggagtcaaggatgactgggtaactggtagatggtggtgccattcgttgagataaagaatataggaccgggtgtggtggctcacacctgtaatcccagcactttgggaggctgaggtgagcagatcacctgaggtcaggagttcgagaccagtctggccaacatggtgaaaccctgtctctactaaaaatacaaaaattagccgggtgtggtggtgcgagcctgtagttccagctactcgggagactgaggcaggagactcgcttgaactcagggaggcggaggttgcagtgagccgagatcataccactgcactccagcctgggtgacagaccaagggaaaaaaaaaaaaaaagacaatagaagagtaggtttttgatgatggtggtgagataggaaaaaatgatgagtttagttttggttgtgttgagtttgtgcatatgagaacatccaaatggaagtggagcttaggagacacctgagctgtaaatattaagtacgtatcatgtatttcgtattgtctaggcactgggggataccgtgatgaagatgaacatggttcctgttctcctgtctagggaaactggttaagcatgtaaatattagcatagtgaatgttttgttgtgagactacatgctgctatgagaaatacagaagggggacgtaatgtagccaagagcttctgaacaacctccgggaagagatgagctgagattaaaggaaggttaggagttaggagaggaagggaaaagtgccgtagttaggaggaaacatgccaaggtcttgaggtgagaaaacagtggcatctgggaagaactagaaagtttagtgtcgctgaaagcatggacagagagagatgagtgaattgaattgcctgggcatcctgggaacgggaagacaccctgatggcagggaacccgcgcctgcgctttcggggtcaggtccaggtctgccccgccagggctgaagccagctcctggtggggctgcagtgaggcggaagaggtgggatgctgctgcctggcggtgctgcggcggcagacctccacgaggaggtcctgggctaccgcggggtacacaggcgggcggaaaagggggagcagagtcagggggcagttgggaagctcggagacaaaaggagggagggagccaaaaagcctacagcaccaggtattcccaggcggtctcccatccaagtactaaccaggcccgaccctgcttagtttccgagatctggcgtgttcagggtggtatggccgtagacactaatggtggtgcctggctgcctcttcaagagcccggcccagccacgcccgcccgactccaggcgtcactgccaccccagggtcgtggggctcggactggggacccctgagctgctcgcctgcggtcggactgctctccccttctacgcccaagcaccgccggtctgccctgctgcgccttccaccggcctcccagagcctccagccatacagcagagatggtggttgggataagagtttgaagagagtggagcaggtctggaacaggtattctggagaataggggagagaacagagtaggaaaatttccacaaggcaattgcctgagactgtccaatttgcagaccagggcttttcagcctcaggactgttgacattttggattgaagaattctgtgatgggggctgtcctgtgtgttctaagatgtttagcagcattcttggcctctgctccctagatgccagtagcactcccctaattatgacaataaaaaatgtccgcagacattggtaaatattacttaagtgggagaatggcctctggttgaggaccactgaggccagccaatgcgtactacaggagaaacatcacacaacctgcagattggtgtcacacatttatggccctgacctggcctctcagttctatctggttcttctgttttcctcataggcgaagtaatggttctaacctagaagacagaatgaggtgaagacaggctaacttctctaagctctcaatgactcacgagataatagatgtcaagatagaacctactaagtgttcagtaaatgttatctattgtcatttccaggagggggctgattgaaactgaagaatagtacagtaggaggagaggaccaggagctgaaaagacaggtcgctatgttgagagagagagagaggaagaaagatctaataggacttcaaaggctgtggtagatgtattactgtcaaaacctgcgcagcttttctctaccaggccttggaaaagattgcacttcctgcaccactggcagcgggctggccaatgggatgcaagtggaaatgaactgtgctattctgagcagaggcttagggaccattgtgtgggtaagtcagtgctctttttcctccacgtgaggctagtgtgtcccaaaatgggggctgctccctttgacctgtctccaagactgaagagaacagggaccatagctgtacctatcctgcgagggacaaaggaacaagcttttgttaattcaagcgattgagatttgggggtttgttaccacagtgtaatttggcataagctgactggcatacggtggagcatcccagatgagggcaagctcccagggcctaacagagtgagtggctggagtatgtgaaggtgaaattctttgacatgaagtggttaaggtcccacgaggccgtggtgttagatgggtcattcatgtgatgttgttatcatccaggaagctggtaggaggtaggaacccaaagtctgtaatgaacaagggaaagtgtgagcaaagtcagcagatgacagcagtaaaggaggagtaaaggggagtatagatctaaatatatatatgtatatgtgtgtgtgtgtgtgtgtgtatgtgtgtgtatatatatgcagagatttggtatatatatgtgtatatatatatgtgtgtgtatatatatgtgtgtgtgtgtgtatatatatatatgtgtatatatatatatgcagagatttggaagtgtggaagaataggggtctgagtgcagtactggggaggccccataccctatcctgaaagcacatgaggtatgggaaagtgaccaccaagatcctttggagggaaagccaggtatcttttaaggcaaagaagaggaggaaagaagagtttgcagatgtaggcaggaagttgtttatgaaacagagtgataggccgggtgcggtggctcacacctgtaatcccagcactttgggaggccggaggtgggcggatcacctgaggtcaggagtttgagaccagcctggccaacatggtgaaacccatctctactaagaatacaaaaattagctgggcgtggtggtgggcacctgtaatcccagctactcaggaggctgagactggagaatcgcttgaacccaggaggcggaggttgcagtgagtggaaatcaagacattgcactccagcctgggcgacaagagcaaaactgtctcaaaaagaaaaaaaaaaagaaagaaagaaacagaatgatagtgtagttggagtcaagagttgactgctttgagaacttgtctccagaaaaagggcatgtacttgtgcaaaatgttatatgcaaattcaaaaaacatttagacttcctagaaccatctgtggaccctagattaagaaccctgatctggaacagtggctctcaaacttgagcaaacagtttgacaggtctgacggtgtttgacaggttgttgggcctcacccagaggtttcagtaacgtaggtctgcatgcggtccaagcatttgcatttctatcaagttcccaggtgatgctgatgtttccggcctagaaaccacattctgagaaccactgctgaagtctaaggctaagggggaaaggtttggggagaggaagaggaacagtgggaaatggttaaggacaagattatgaaagcatcatggggatgagaatggatttttgttttgttttactaggcttaggcagatactccaatatttctgacacatacatacacggaaaaccttgcaagagtggagaaaagaagggagaggtgagtgagcacttattttaagtttagggcaaggggtgcaaaaaaatatcttttatagccttaaggatcactttcttgaacacccttactttacaacaacagatgtgatatcaagtatcacatggccaattcacacctttggtctggtaaccagctcttgccccctctcagtctagggcttgttccccttcatcattaacctctaagagaatcactagtgggaaataagctatgcttttgattcaaggtaaagagactcgaactttccagtgccctaaactgggaaatcttaaactccagcaaagtacaatgctcaaaactgggtaaagctgctaccttcgtaggggatacattttggagaaaattgcatctactttcttctttgtcttttctttttgtgtgagtgtgagtgtgcatgacagtttgtctatgtttgaaaacctgaccatcagcattcctggaattcttggcaatgaattaggattgccagttagctgcctgctgggtgaccttaggtagttcacctcgtgtctctaagcctcagcttcctaatctgtgaaacaggctgatggaccagtgagataacgcctgtgaggtgcttatcacctgatactgcctcttcttgctggcacatcaagctggaggattgcagcatctgaacacgaatgaccaatcaaatctcgggcctataccccacagacgtaacctttatctcccaccagagggcaccagtaacctataaaaatctaagggggcgggcggtccctcttgcccttaacatcgttgaatctgcttgagtataactcccttaagtctattgaaatattcttacccctggtgttttaagaaatcatttgaaaaatacctctcacacccagaaggaaaatatggagtagaagtgtagggtaaatggtgctccaactccccaccagccaccaagagagctctatttccattttgtattttgtccatttttaccattcagtctccatctcctcgagactatctgtaacctagttttacaaattattctctcagtaataacctattgcagttcccttcttcctggtttattcaaatgaactgaactgctgttttttttccctttgatgtacaacctcccgcctcctagcctatcgggccagccttccttccagcaggcagtagggggagggatctatttctgagcctcggtagagcctcagaagctgtttccctgaatccctctgtgatgagagcctagtggtcaacaggtacctatcacaaaaggctgtattccaggagaaaactctttccccatctaaggaagggaaacgactagaagttgaggctacccaccaccacctccctgaaaacattacagacttcagggactcaatgataaccaatgtgtatctgtgtcctgtatacacatagggtttgttctttgtctttgttctttaatttgctggggaaggaaatacagcctcgggctagctttcaccattgcacctgggagtgctggccgagacaagaaaagccaacaagaatattgactagaaaaagggtattggccaggcacagtggctcacgcctgtaattccagcactttgggaggctgaggcaggcggatcacctgaggtcaggagtctgagatcagaccggccaacatggatttgtactaaaaatacaaaaaactagccaagtgtggtggtgtgtgcctatagtcccagctactcgagaggctgaggcaggagagtcgcttgaaaccaggagacagaggttgcagtgagccaagatcacagcactgaactccagcctgggtgacagagtgagaccgtgtctcaaaaaaaaagggtatgctgtttgtcttattaggaacacagaaccatggaatattcgggatgaccaggactccggaaatctagtacaacctttcattgttcagaggggagaaacatgaccagggtcatgtggtttgtgaatggcagactagctcttccagctcgaactagaattcaggtctgtgggcaggcacaccagttcctgtctcaccattccatttctgaatcagccatcgttgctagcatttgttgtttgcttagtatgtgtcaagtatctgttctttaaatctcacacaatcctcacaacaactctgtgaaagaaatgaattggtataagaatgaaatacattattctcattttacacaggcatagagaaaaatgatgtaggacaaaattagctagcattctgtttaaatcaatattttcccatgagggttagcggcattttgaatggaataaggttttggtttgttttttaatgggactactcctagcatagcatgatatttagcatttttggaccccaagcactaattgccccagtcattataatacaaaaaatttccaaaagtccttaaacgtagactatagatggtcctgttgctggtggagcactactgatttttttttttttttttttttttacacagggtctcactctgtcaccaggctggagtgcagtggcacaatctaggctcactgcagcctcgacctcccaggttcaagcaatcctcccacctcagcctcccggttagctgggactatagctatgcgccaccatgtccctatgttgcccaggttggtctcgaactcctgggctcaagccatccacctacctcagcctcccagagtgctgggattacaggtgtgagccaccatgcccggctgaacactactgatttaaatgcatgggcacaaggaaaggagtagttaacaaagttgctttgttagtttggttatttttatatcaataaaggccacaagatggaaataggagcaggacaagaggaaggaaatcccttggggtgagtgtggctctggaagggaagaggttaaattataaaggaagggaatgaaccataggccaaggaggatcctggcacatggcaactggtaaaacttggaggatgaacaaggtctggtctcacaaactcataagctacagagaccagtgcgatctcagaggagagctgctggaatggggacagtagggagtgcaggaggtgagagtaaactggagatccatgcccataacaatgggataaccaacacccaactccggccaggtcttttcagatggtagtgtgggtcgtggttgccagcctttccaatataccaagaaaatccacaaggctagatttttctaggaaatctctctgttgtcaatattggatcaaaagaaaagttttgaaacactaggtagacccagagaaaaatgcttgcaggtgaatttgggtagtccgactcatgggatctctgaggggccattctcatctaaggtgctgtggtacatgcccactctgctggttgatgaaagggagacaggtttcagctcacacaagatggaatttaccaccagtctatgctggcaaacagtgagcaggctgggcagaggagtagtaagcattccctggggcaccgggctccgcacaggccaggagctgtcacaggagctaaagcagggattcctgtgccatctccggtcccttctggatctgagattcaggaattctggggctgtgattccttgaaggcagagccgggaacatgaaaaccgtagacactaatcaatgcctgtagtgctaacagctcagacccctgggcaattgttcttgagcttggtcctgtcattccctctgctgtgtaggaatgaggaaaagaagtcgcgtgagtccctgctccctagaggtctttgccttggttcataatactgacagtttgcaaaatcaagctgcttttattctctctcagccagtgagtccctgacacaaactgcagagctaaacaagcaattttccagcccagctgttcaggcacactctgagtttaaacgcactcttctttaaaaaccaccaggagctgtatcctcccccatgcttgtttcctctcctgttaacccagcagaaagtaggttctacaaggtagcagtgcttaacatgctggtgcctgcagatcctccactggacgctaccctccttcccctgtggagtgatgacgggatgccccacttgtttagaatgaaaccccaaactccagtgtgtgtgcgttctctgttctttccaggtggggcctgcctgggcttctcgctgtctggtggagccccactatgcctttaaaagcagggcctttgatcatttctgacttttagcagcagatagtcaaatgagggggaggtggcagggctttgccaaccagacccctgatgtggacgagttgaaaacccaggctgcaaatgttaatattgtcacatgctaggaaatctctgcttcaattcaccagatactagttagtcattggcttgtgaagtctgtaatccctctcgtttctggctttgcttacaaccctgcaccctgggtgctggagcagactctcaggaagggagatggtgccaagccctgttcctgtctttcttggtctgcatgccagcttaggccaggtttttattgagcttcaggatcggatcttcgttataggcggggaggacagtgtaggtaaagcctactgacaagtgccttagaccccttgcactgccataaaaaatatcttagcctgggtaactcataaacatctttttttcttttctttttttgagacagggtctcactctgttgcccatgctggagtacagtagcacaatctccactcattgcaacatccacttcccgggctcaagcaattctcgtgcttcagcctccctagtaactgggattacaggtgtgcaccaccacactcagctaatttttgtatttttagtagagatggggcttcaccatgttggccagtctgttctcaaactcctgacctcaagtgatccacctgccttggcctcccaaagtgctgggattacaggcatgagtcaccgtgcctggcctcataaatatctttatgagttgtttattgctcacaattctagaggctgggaagtccaagatcaaggtgctggcagattcggtgtctggtgagagcccattctttatgggtggtgctctctatgtgtcctcacgtggcagaagggcaaacagctttcctctagcctcttttataaaggcacttgtcccattcatgagggctctgctttcatgatctcatcatctcccagagtccccacctcttaatactatcacctcgggaattaagtttcaacatatgaattttggggagacaccagtgttcagaccatagcacaagccatgcagcacaatagacagaatgcatgtggaggctaacaccagagaaggtcatttttggggtttactccatctggaccaccctctggcatccccagggtcagtctgtaagttgtaattttcttatctcttttctattcagcctcggtgtctggatgcccagcctaaccaagtcagcttcccatctttggctgagacaaggagaaccctgctgggctaggggacccaggtaatgttgctcaggcattgtccttttttttttttttttttttttttttgagatggagtctcactttgtcgtccagactggaatgcagtggtgcgatctcggctcactgcaacctctgcctctagggttcaagtgattcttgtgcctcaacctcccgagtagctgggattacaggcatgtgccaccacacctcactaatttttgtatttttagtagagacagggttttgccatgttagccaggccggtctcaaattcctgacctcaggtgatctgcccacctcggcctcccaaagtgctgggattacaggcgtgagccaccatgcccagatggaaaagacattttaatgccacaaatgtaggaagaatataatctccaataatggacagtcttttgaaggaaatcatttagcttcgtcaaaaaactgacctcattcttatttttctaatttcatcccccatgtgacatccttgttacacactccccggccctcagatgggactggcacttgggtgcctctggactagatttccacttttcatttctactttctgtgcctgtctccatgctttctgctttgtgatgaaatgaggatagtcataatgttagaaaaagttgtgcaagactttgaaatggcaaaagaaggttgttattgggcattctgtctgtttgcctatgggttacccctgcctttctttcattgtctttgagctattttatgactctgaaaattgtagaaaactgataacaatgcaaatgattttgtccatagaaatgcaaattatatccattggaaatgcaactgattattgccctatggatattgaccagttttatatttgttaagcaaattaatgtcagcattcccgatggcttctgtatgcatctgctctttggattcttttttgagcggtcgtaacatcttactagttcccttattaatcgacgagttaaatcattggcatgtctgaatttcatgtttgtaagaggttgtatttatacaagggccttgatttttacctttaaacatttctttaacaataactcccctgaaggttgttatgaggcagaatgagatcatggataagagagtgcctggctcagggcctgaattcacctctcatagttgggacaatccttgcttcctcctggtttctgggctctagggcaccttgtattctcacaaaaataaataaaatcttttaattacacttttcacattacagcattagtaactttcatgagaattttcacctttcaaaaggagaccctagggagactataatgcttacccagaggaattcctgcaatggtggaaatccggagggtggagtacacaggtgccacagatattgggggccaagggcctttaaaataacctgcctaggtgctattcagctgcagagggcagttcagttccctgaccttcaccccttcccccatgttgggagtgctggccttaccatggtaaggagaatggttacaactttgtaccaggatttaaaaatatatactttattaaatccgctcctcagctaaatctgtgaggtgaacatgtttatccttgttgttgatgagaaactaggacaggttaaatgactcacccaaggttatacagctaggaagttgttgtgccaggatttaaatctaatgccaggggccgggcccagtagctcacgcctgtaatcctagcactttgggaggctgaggtgggtggatcacctgaggtcaggagttcgagaccagcctggccaacatggccaaacccccgtctctacgaaaaaaatacaaaaattagccaggcgtggtgggaggtgccaataatcccagctactcgggaggctgaggcaggagaatcacttgaacctggtgagggccgggggaggggtggtggaggttgcagtaagccaagattgcaccacttcactccagcctgggcgaaagcatgaaactccgtctcaatcaatcaatcaatcaatcaatcaataaaataaatccaaggcctaaatccaaatctcatgctctatctgtgatctgagccatggagtagccattctaatcaggactctttttttctactccaaactcatcaccactgccaaaatccactgccaagggttacacctgggcaaggacattgctccagttcaaattcaaatgacctgggagacaaaacccacttttgtgaaaatatgtcagaaagaaattgatctgaacttgggaacaggttttgatccaagggctagtgtacagcccagggagggccagcggaagtaagaagacagctccatccatcaggagcctctgtgttcaggggacagtgggcagggggtgggttgccaggagagggaagaagctggggaggatcaagggaaaaagttaggggaagagcgctgagagttcacgcccactctcctgcttgggccctgataactggggaagattcagggcagagaaagaggagtttacaggtctcaggaactgaggtgggttacacccagtaaatgacttcctaaaggtcaactagccaaagccatgccctcctctgtggcctgggccaggtggggcaggccaggtggatgctgggatggcccagagggcaaataatggacaatgaaccaggccagggcagcatctctgctgggcgggaaaaacaggaagctcaggcacatgcaagccaggtaagtgtgtgtcttgaagatggatgagagttcccagacaagggtgaccttttctttcacctcgtccagctagacagacgtggtggttccaaggccccttgtcatctgctgattgctttgtgattaatgtacaagtcacttattcccatctcctgtccctgctccattctcccccagctcccgggcagactcttctgcccttaggtaatttacttagaaatgattgtccctagaatctctccatgtgctttgtgtacagatagtgaccaggttctgcatgtgatttccctgtggaattccaaccaaggacagacaggtgagtcacagcactatggagagacttaaatatctgcaatgagcaaagcaaggctcagccgggggcagactcagtcctgcaggaattgcccttcttcctgcatggttttggggtcagctggagagcaatgagtttgcacatgctggtcattcaccagagctgcctgtggggtctcaacagagttccacctagaagggacagcctgaccctggtttacctgggaaccagagaaaagcagctggaaggctactctcaagtcaccaataccaagccaggtagaccctatcccctacaaatacaggaagccagtggtctccaatggacattattacttcattttcacacatattttattcactttgacctggggctcaaaacacagactgcatataaaatgggtttgatgctgatttggctacatggacttcataattcatcagagcaggaaagacagaatcataagctgttattcattcattcaacaaatatttactgaacaccagacaggagagagggattgcctgtgttaattcattaggaagagcacatcgtattaataatacttcatgctgttcagcttttcgtgctgcagcagaaattatttaattaccctttacttccaccccggcctccctaccttccactacagagcagttgaaaatgtttttgttcagtatggggaagctttgtaaggtaaaggacaggcaggagagaaagaatgctctatttgcaaaacaaggccaggggtgtgagctcttgaaagacagagcaaagttatgacagccggaggaatgtgaattcctccaacagaccaaatgggagcttcagaaaaaaattaatctggtggcagaatatatctggcttcagacttttaagtatgaaactagctgctgtgagaataggaagcccacactcagagctcagcctgccctctacagagcaggcaggcgttcctttccctggggactacgaagaagacaagggcttccgaaggtgtcccacacgcagcctccctccttccccaattccccctcctgcttccacacttatctctcccccagtgagtgatagccaaatcctctccacttgcagatgtagccttgggaggacagcacaaggggatgcagccctggagcagcagcaggtgtggcccatctggactcaccactgctgtggaaaggggccccggccagctggccctgtgggctggaattagagcagtcgtaatgggctgtgttacacagtgtgctcttctaatcagatacatgtggacattaactaattaacggcagccctgtgagttaagtattgtgatgagtgaatttgacagatgaagtacagagaagttaaatgacttgcttggggtcacactgctagcaaggggtggaacagggatttgaatctgggcagtttgcctccaaagtcctcataattaacagtgatccattctgccctcctatctgaccatttctcttatgttagactcttttgaatgcaagtgacagaaacccaagctaaggatgctccaggcaaggaagcagcatttgcaaggcttggagacccaaaagaaggaaagcggtcagggagggttctaagttactggaaagagagacagagggaagtcacaggaggaccttcaattgggtcaggcacagggaggcaggggctcaccgccatggcctgagctgaggacaccagttgtcactggggctggatgtgaggagagacactaggggactaagcatggcctggaacctgctgccttccttggcccgcgctcctcacaccctcctactcccaactctcctctctttcctcatttattattattatttttatttttttggtggtttttccaaatctttttcctgctgccgactcccctgaagtccctgaagaatgagggcttcacagaagcagctttgatctctttcagtggctcccagaggggctgtctctggtgcagattaagtgtgtagtttgacacccatcccattagtcctgttcttttaattaaacattcagtaggaggatggcgctgtggctggcattgggagccggcagggggccaccgggtacattgaagccttctttctttagtgggattgcgtgccttgattcatctttttccccctttgccactctccacttccacctctgccagttttgatgtttgagttctccctgaatccatacaggatgctggccatctcagggaggagggcaaggcaagctggcaacttggccgagctcctgttggactgagtggtttcctcctcgggctgttgtgtgtgaacttgagtgagccattcaaccttcctgggtttctgtgtcctaatgcatcagacagggcgacttgtgactgctcctcctgacctcctgtacagggagaggctacaggacaaatggaaccaagaggagacccagaaggcagaggcccgagcagtgtgtccctgagatgcccaggtcagggcatgccctaccccttcccaccagcaaaagttccagcagcaaggaggttccagctgttcccttggaatctgttaggcttctgtggttgggggatgggtgcagggaggagagaagagactggagatgatgcagtggcagagcagggggtggtggggtgaaggctgtgggcccacaaacttgcttatatgtacaaggctgcaatgaatgcagcctctccttccctcccctccagctagctggagtgctaactggggtggacagacaggttggtttgggagcaggcggcagagaggagatgggcagagccgggagcaggaggatgggccagataaccctgggacctttgttctatgacaggcaagtcagcaggatgtcaggcctggcttgatcttacacccctcgactgaatgcccgggagtccctgagcgttggggcaggaggagccttagagactgtaaggacagtgtaaccgcctagtgggttcaccttccctgctgcctagacaggggaattacagtgaagaaacagtaattcatgcagagccagctgtgcgggagaccggagttttattattactcaaattagtctccccaagcatttgagcattcagggatcagagtttttaaagataattcagtgggtaggggcttgggaagtggtcagtgctgactggtcaggttagagatggaatcatagggggtcggagtgaggttttcttgctgttttctgttcctgggtgggatggcagaactggtgaagccagattactggtcttggtggtgtcagctgatccatcgagtgcagggtctgcaaaatatctcaagcactgatcttaggttttacaatagtgatgttattcccaggaacaatttggggaggttcagactcttggagccataggcgacatgacccctaaactgtaatttctaatcttgtagctaatttgttagtcctacaaaggcagactggtccctaggcaagaaggggcccctctgggcacccagcctattagatggtaactatgcagagaggaaagggcagacttagtccgggttctgcccctcgtgcactatgtgcccttggccaaaacacttcccttctctgggcctggtttcctcatctggggtaactatacctgccttcttgtgcctcatggggtcagaggctaaaatgaggtcattctctcttttctggacatttataatttaattacaactagttcttgaccctgagagattcttaaatgtgtctataaaatttagaaggtctgagttttactaacctgcatcatttttctgggatcccaggattcccagaccagagggtggggcagggccctgtgatatgtctaacacacccatgaggcctagagtgcacccaccactggctgcaaagcactgcagctttataggtcctagagcgaaaaatggtttacatttattgaaggcttttaaaagaatgttccaggttctccatatctgttgtttcattgaagtgtcaccatctcattaatggctattgtcctcattttatttacgttatgtttttgttttttttgaggcaggatctcactcttgtcacccaggctaggatgcagtggcactgttacagctcactgcaacctcgacctcccgggctcctcaattctcccacctcagcctcccaagtagctgggaccacaggcatgtgccaccgcacctggctaaatgtttgattttgtatgtaaacaaggtcttgctatgttgcccaggctggtcttgaactcctggccttaagcgatcctcctcccgcttcagcctcccaaggtgctggaattacaggcgtgagccactgcacctggcttggcctcattttatacacgagaaatttggggcctggataaagtgtaattatgtcttcacacaactggcaagtggcagagccaagactcaaaccagggtttggggggctccaaatccctcagcctctgctgccttgaggccttggccagatggagttgtagcaggcgtgaccctgcgggtgcctcagatcaaggactccccaggtttgccaggtggtggcctcagagaagcccagggagctgctggcccctcctgagaggctaggggcaggacacaagctctcttgagtcctcccaaagctgaaggaagagacgaagtgaagggcccagggctgcagagaggctggacaaggcagagctcaagtcagctcctcctttaggagcctcctgaagcccctggggagctgtccctgactgtacttctgcaacaggtagcctggcctcttttagggcacatacatatgttactacatttatgttattgtcatctgcaggtcgtaaaattccactaggggttctcccttattcccttgaaaagtccttgagagcagagaccctattatgtgttgccctaggtaccaggtagaggcctttcaaagattagtaggtgatcaatgaatattgttgagtgagctattaataatgattatttctaagaccataaaaggtgacttcatatacatgatcttatttcctcattcattcaaatccgtgtacatttgctgggcttacgataatatgcctggactttgctagattctgggcatgcaatgacaaattagacaccctgtctgtgcccaagaaacttatgtcagggtggggagagtgcaggaaaaagactgaaaaagacaaaacaaaaccaaaaatgaaagcacagaaaatttgcagtatgtgcagccagcagtcaacgggtgctggtgaaaccgagaggaggaggctccagcccagcctggatcaggggaggctcccaggggagaggaagaagggttgggctttgtgtgccaggaaggagggggtgaaggggaggggatgggggctctggaggcaggggagcctgtgggagatgggacatgttcaatagctcagtccagcagtgcagaggggagttttgagaaatgaaacaggaagagggaagaatggaaaccacaccttttattggaacatagagtgctttgtatttctcaaaacactttcacatctattatctccagttagcctaaaaacaacagcagaagcagcagcaacaacgatgctgagtgctgactgcgagcctggcttcctcggagggagtttaccgtgcgctgcctccttggaccctcatcactgccctgcgaagcaagcactttcctcaccccctctgtctggaggagggcactgaggcaccgagaaaactgggcaggggaggcccgagaaggagagggtggcaccgtcattctcactttccagctgaggacacgggtaagtggcatgcgtccgctcctgtgacttacaggagtcccgggactcgcactcgggcctctggactcctagcctggtgttttcccctggaagtttctgaaccaaaaaaaaaaaatgtctgaaccaaagcacacaacgagattgtgagtggaaatcagcttcagcttccctggtgtttctccacggtgatcctctgtgtctgtcactgaaggggccaggatgtcaccaccaacggtaatgacctgggctttgagtggagcatttaacctgttcagccagctgttggaagtgcagaaactagtccctcccagtcacaaactaccccggttgctccaccatctgcatccagcttcattacttaattcactttgcaaagttaatccagtgatccaagctcctaatagtccccagtttgacttccgcagcttccctttctctccacacccagcctatcccgggcttctgggtcaccaagaagcaggaccctttctgttgatttcttctgggaggaggccatctcaatagccctttacaacaacccatgaggtctcctgatttccgtgttttcttggagtcccctgagctttggtttgcagcacaagctcattcccctctgtgctcccctctcactgtgtggaaccttctctaatagactcacctctggggagaggacgtgctcctttctggccgcagctgcagccattccaatgtacatcaaagcgctcgtctttctatctccacttcttaaatggttttgctttttctctatttcttccttctcatgggcagctcagagctcatctgtgacagtgaccacccttctgccccagccctggccccacgaccttccctaacactgcaaacaacttcactcttggcctcctgctggatatctggtcagtggcctacattcctcccactcatgcctctttcttttctttcttttctctctctttttttttttttttgagacaggatcttgcccaggctgaagcccaagtggcaagatcaaggctcgctgaagcctcaacctcccaggttgaagccatccacccacctcagcctccagagtagctgggaccacaggtgtgcaccacgatacctggctaattttgtctttttaaaatttttttgttgacaaggtctcactatgttgcccaggctggtcttgaactcctggactcaggcaatcctctcaccttggcctcccaaagtgctgggattacagttgtgagccaccatacctggcctgcatacccttttctatctggctttctagactttaaaatctttcttggtggctccagtttgccatatcttatggtcctgaaatgacccctgtcactgaggcagggagcagaggagactgggaatttgtgctgatggtaaatagatatggtttgaatcctggccactgcccaccagccatgtgaccaagacttaaccatattttttcggggtgttatgcagagataatgagatcaaaattgtaaggcatctagtactgacataataagctctcaacaaatggtagctatttaagtgttaataacaaatccttttcagatggtttctataacagtgaatttgcaaatagttggaacctctgaagtgcttcctctcctggactggaaaccccttgaggtcagtggccttgtctgcctattcacaatgtccgtctagcacatggtaggctcttaatatatatatatatatatatatatatatttatttatttattttttgatgaatgaataatctagactatcctaaattctgatatcacgattcctttctagtattaaattccaaattataatacatgttaattgcagaaaaattggaaaatattttttaaaaataggaaaacaaaaaaatagctgtgatcctagtccctagagatagccacagttaatattttgatatatttccctgcagcctttttttctgtgcttatgcatatttcaaaaattttatattctggcttttcagttaacataatgagcatttccctgtgttactaaataatcttcataaacataattttaagtgctacatatattattctgtgctatgaatgtatcataatttatgtaaccaatacccagtggttgatatttaagttgtttccatttttcaccattataaataaagctacactgaacatccttttgcataaatctttgtgtatatctgaattaagattttctaccaagaataaattctacaaagtaaattgctgatttaacagtgaacatgttaaggccccaggtaaatgtcttgttaaatgattcttcatagaggttgcactcattgtctgtcctcctgctatcaaggtatgagaattctcaccaccagaatattgtttaaaatgaaagagtctttgccaaatggagaagtgagacacaaagcctattttttcatgatgatcgctcctgtctttgacaagcatggtgcttgtcaacttgacattttggactagatggttcctggtgtgaggggctgccccgtgcattgtaggatgtttatcagcatccctgaccacctactagatgtcagtagcaccccctttcccccagttatgataaccaaaaatatctccagacatcaccaaatgtcccctggggaacaaaatcgcccctggttgagaatgatggagttatactgtattaactctattggttacaagtaacagaaaccaactctaagcaaaaatggggactttgtgagaaaagtcttaaggtatcatggaacccaaaggcatggatgcaagtgggcctccctcctcttttcagggctgcctcattcttttctcttgctgtagactggctttctctctattcttgactccaaggaggagaacggccaccactaatatttctgaagtttatgtccctgtgtttatgagaaagccaggctaccctggagtctcttggttccaaatgctcagggaaggactctgagatgcgcagcttaggtgggctatgcacagctggtcccatcagtgtggctgtcgggggacaggaaggacacgtggctcctggagatcttgttgtatccatgtggatgtgcctgtatttctagaaaaaggctgctgggcagctgatcccttaggactcccctagatgcccacacaacagaacactggacactttggctacaaggccagggactgtctatctcaacggtgtacccttcatagttcagcctagatgtccaagcttggcttgatggtggcaactgctctgccacccaggctttggtttaggggtcttttgggggtggaggggccaattcctctgtgactgactggctgatgcagcttacttgaacagatccagcctagagagccaactttagagactggcgtttgcaagtctgtaatggtgtttgacaggggaagtagatgactgctggtcctccttcataaactcggccttggagtgtgcagccactgaggtacaggggtcccgtgctgtccctgcactaactggagtgctcaaaatccagcctctgccttcaagaagggagcaggtcggtgtgcagtcagcatggccctgagacctagccctgaggacagagactgtcccctgtgggcacctggagctgttggtaaatgggcagaaaggcagggctgttacccatacttgtattagaggaagagcatcctctttttctctctcttcttttttttttttttgagacagtcttgctttgttgtcaagctggagtgcagtggtgcagtctcggctcactgaaacctccgcctcctgggttcaagcgattctcctgcctcagcctcccaagtagctgggactacaggcacacgcaaccacgcctggctaatttttgtatttttagtagagatggggtttcaccatgctggccaggatggtctccatctcttgacctcgtgatcctcccaaagtgctggaattacaggtgtgagccaccacgccaggcctagcatcctcttctgaaagtctttccagcacacagatgccattcctgccttcacctcgccgtgtggtcttggacggtcatttctctgagtctcagtttcttcatcagaaatgaaatgatacctgccttggcttcctcatagcatctaaaaagacatttgatagaaaagtgctttcaaaagcagattgcaggccgagtgcagtggctcacgcctataatcccaacactttgggaggccaaggcgggtggattacttgagcccaggagcttgagacgagcctgggcaacatggcaaaaccctgtgtctacaaaaagtacaaaaatcagccgaggatggtggcacacgccggcagtcccagctactcgggagtctggggtgggaggatcacttgagcccaggaggcagaggttgcggtgagctgagattacaccactgcactccaggctgggtgacagagagagaccctgtctcaaaacaaacaaataacaacaacaacaaaaaaaaaacaagaaacaaaaaaaacaaaagcagattgcaaaagcagtgcacatcttgtaataaagatgcttatgatcattatttcagttctggggaaattctaaatccttggcgccacttattgcacaacagaggcagggcctggggcagtgctgcttctgcgccatctctctcagacctggagctggctccagatttctgctgcctgagaatatttcagggaagtttcccctagaaactgagaagcctaaacgtgagttgggtttttattccctgtgtgaccatggccatgttaattcacctctctgggcttctatctcagcatctgtgaagtgggcataatagtggcatctatttatacgtcatttatgcctgtcaagtgcttgtgcctggcacagggtaggtgctcactcagtggttgctctgcttgtttatatcacaatgtggcaggcactgggccaggtgccaggcactgagagatgaatagaatgtaaccagcccttaggacacttatgatttaccagaggagatggcacaaaaagcatattaaaaagcaatgtggcaaattaaatggtagtaatcctaccaagtgatagtgctcctgggattgggttcctctcagatgctccccaggggctactggagtgatgtcaggtaaggcaggacaccaggaaacacccattctcccgggctctctgcagagcaggcagcttttggacctacccgcttcaaggagctgaagaaatgccttcctcctcacctctcaggctcacagggaacatttttcaaagggaaaaactctttttttttttttttttgtagtcatccaatgttttcaaccctagggcaatggttagggagagaggacatcttgtgggtggcctataacacggtcagtaaccttatgccacaaagactacacatgacatagaaaggtacttatgttgtgcaccgaggaggcactgaccctgtgcattcccagcacctcagaaccgctagctctgtgcaaaccttccagccacctcgggcccaggaaggcggggtgggggccttgattcagaaaaggcagagacactgcagtcctggggaggggtgatgtctagagcctgagaggagcagtggagcactcacgggaaatgcaaagcagacgcaagaccaggcccagagcctggcggaagtggggaggggtggggcaggtgtggggcattagttggggaggggcttgctaggaggaggtgacttcagaaggcatctgcggactgtggtctgggactctgctggatgtggcatggctttgccaccctcaactctggtgtgttaaagaggtaaaggtcacacgtacacatggatgaggacagggaagacacacaggaaacaaaaacagatttgttagggctgtcgaagagtggtttgcttattttgaggcctctccccatttctcttttccttatcaggatgtgtacggcacccgcatcccctccatctgcacccgcagccacagccacagccacagccagcgctatgtcccgttgccattcacattcatacctgcaacgtacactcatacatgtgtcggatatttgcgaagaagctccctttcccacctaggtaaatgctagcttccagaaatttgaaaaaaaatgagtgtaattcctactgggttggttcccagcaggcctttgtctttccttctccctcctccaggcccctcttctttcctttcctttcctttccctcctctacctctttcccttcctattcttctgctcctcctccctcccagctggttccctatttcccttaccccctcaaacatctcccctctctccatccccactcccaatctgccaaacccacccccacctaaaaatgtggaccgtggagtctctgaccgaggtttcctttcccaacatggggagcccgggctggctgcgatttgttggggacaggtaagaaggtgcaaacttgggggttcagagggagggcggggggggtggctgggatgcatggggtaggtaggggtggcagtttttccaaattatacattcaggccatatgtggaacccttgcagagacctggcttgctgtttttctgtctcttcctggtgtgctgggcagtctctctgtgctcatggtttaaccagtctttctttatttttattttatttatttattgtttgagacagagtcttgctctgttgcctaggctggagtgcagtggtgtgatctcggctcactgcaacctctgcctccaagtttcaagtgattctcctgcctcagcctcccgagtagctgggattataggcacccgccaccacgcccagctaatttttgtatttttagtagagacggggtttcaccaggttggccaggctggtctcgaactcctgacctcaggtgatccacccgcttcggcctctcaaagtgctaggattacgggaatgagccaccatgcctggcagctcttttctatttcttttttggctctctcttgtctctctctcttttttttttttttttgttttttgtttttttttttgagatggggtcttgctcactatgttgcccaggctgatcttgaacttctgggctcaagccatcctcctgcctcaaccagccaagtagctgggattacaagcgaatgccacagcacctggctgctcatttccttttagcgctgaataatattccattgtctggatgtaccacagtttatttatccttccacctcctgaaggacaccttggttgcttccaagttttggcaactaggaacaaagctgctataaacatctgtgtgtgggtttttttgtggacataagttttccactcatttgggtaagtaccaaggagtgcgactgctagattatatggtgaaagtatgtttagttttgtaagaatccatgaaactgtcttccaaagtggctgtaccattttgcatccccaccagaaatgaatgagagttcctgttgctccacatcctcactaacatttggtattatcagtgttccagatttggggcattctaatgtatatagtggtatcactttgttttaatttgcatttccccaatggcatgtgacgtggagcatcttttcatatgattatctatcatttgtacatcttctttggtgaaatgtctgttaaggtgtttggctcagttttttctttttttatttttatttatttatttatttttttatttttttgagacagagtctcgctctcacccaggctggagtgcagtggagcgatctacgctcactgcaacctccgcctccagggttcaagctattctcctgcctcagccttctgagtggctgggattacaggcacacgccgccatgcccactaatttttgtatcttcattagagtcgggggtttgccatgttggccaggctggttttgaacccctgacctcaggtgatcctcccgcctcggcctcccaaagtgctgggattacaggcgtgagccactgtacctggcctcgactcagtttttaattgggtgtttgttttcttatggttgagttttaagaattttttatatattttggatcagatatgtctttggcaaatatttctcctagtctgtggcttgtctccttcctctcttgacagcatcttttgcaaagcagtttttcatttgaatgacgtgcatcttatcagtcacctctgtcatggattgtgcctttggttttgtgtctacttttatgtggactgtaccagccacggcctcctgactcccgactcccgactcccctgcattgcttcatctcctgccctctccgctctgcactttgaggatctctgcaaactccactcacattagcctttcagttccagatggccgggcccctccctaccccagactgcacctgctgtgcccttctccagtcaactcccaccatcctttgaaactcaactcagtatcactaccttgggagagccttccctggtgtctcagtccagctcaggccctgattatatctcccccagccactgtacttccatttccttccatgtatcacagtcataagatgcagtttcgctgcagcttcaagggttaagttccatgagagcaggtggaatttctttgttggtcactgtcttatcttcagaatctagcactgtgctttgcatatagtaataattattattttaatagcaaaaatatctattgtaccacgtgccagaaacccttctaaacaggttacatatttagctcccctgttcttctcaatacctctgtgagtatttgattattgccagtttatggacaagatatctgaggcccagtttgcttgagatcacacagctagtaagtggaaaagctggggttccaacccagacaatctggctccagtgttaatgttctttataatactgggttgcttctcaaatgcagtatatcttcgttgactgaatgacagcatgagagagaaagagacagaggcaattaggaaatggtaagagaatacagctagttaaagaccagagtgaatgaaattaccatttgtctctgaagggctccttgatggttgttgatcgactgactgatgtagtctggaacagggacatgtaacctgccccagcctctctttccttctggggatcaatagcctgggtccttctcaaggggcatgttggaaggatgccacagggtgccacagtaccgagctgcctggggtagagacagcctgggctgcaggtaatgaccactgagatgtgcaggacaccaattaaaaagcttcagtccattgtctccagcagttccggctcagttccagccctttttagagaaagatactggattgcccaggggacccccaaggcccttgcccccattcctgcatctggtccaggctctggccacatccggggccttgttacagacttttggggcatttcctcagcctcctccagtcaccctgtgtcaggaaatgttgctatccaattgtaatgtctaaaaggaattttccccgacagtgagaatataattgaggagcctcggggaatgttattctcctccctggggacacctggagagcataacctccatccacagggctgcagggctggttctgcgagctcattcattcagcaagtcagggcatttcagttgtccctgcttttttttttttttttttttttgagacagggtctcactctgtagcccaggctggagtacagtggtcctctctgcagcctcgatctcctaggctcaagtaatcctcccacctcagccccctaagtagctgcgactacaggcacatgccatcacacccagcctcagtggttcctgctctttaaaagagaagagaggcaattttcatgcaggaagcagggacttggtgggcctccagaatgagaacacaggctttgaaaggtacaagaggtgtggagaaggtgctgactcacagagaagctgatgtgaagccagaagaccctggaaaagatggtgttcccctcagagcctgccaggctcctagaaagccttgaccaagatggtggcctaggactctgaggaagaagtcgggcctccctgaaccagtctagattcctgcttcctagagttataaggaaggtgtggccaagcaaatataggacaggcagacatgcaggggaggaatcttgaggccagagaggaatgagctttccttacccaggagtctggaatgagattcctgaggcccagtgcaggaggccagcagatggctggcacacacaagtacacaagtgctcgcaccttaagaagatttaagggaacaggccccgggaaggtcagatgccttcagacccagaatgttggcagtctgacccctgagcttctgtggttaacacctaccccttagagaggtggggcaaaaaaaaggaactacggttttgggtggcctagcagtgccaaccaatctaaccattttttcagtgcggtcaggactgaactggaacttggcgataggtcaattcattacttttggatatttctgaggaattgtccttaacgtcttagaaaagtccccccatacccccccccttttcttttttgagacagagtctcgctctgttgcccaggctggcgtgcagtggcacaatctcgactcactgcaacctttgcctaccaggttcaagcaatcctcccacctcagcctcctgagtagctgggattacaggcatgcactaccattcccagataattgttttttgtatttttagtagagatggggtttcactatattggtcaggctggtctcgaactcctgacctcaagtgatccacctgccttggcctcccaaagtgctgggattataggcctgagacactgtgcccaacttgaaaagtctcttttttaaaatcttgttgtattagggcattcttgcgttgctataaagaaatgcctgagactgggtaagttacaaagaaaggaggtgtaattggctcatgtttctgcaggctatacaggaagcatggcagcatctgcttctggggaggcctcagaaggcttccaatcaaggcagaaggcaaaggaggaacaggcacaatgtatggcaaaagcaggaccaagagagtcggtggggaggtgccacacacttttattttattagtttattttattttatttttttgagacagtgtcttgctctagagtgcagtggcacaatctcggctcactgcaacctccgcctccccagttcaagcaattctcctgcctcagcctcccgagtagctgggattacaggtgcacaccaccatgccagctaatttttgtatttttagtagagacagggtttctatatgttggccaggctggtctcaaattcctgacctcaggtaatccacctgcctcagcctcacaaagtgctgggattacaggtgtgagccactgcacctggcccacacacacttttaaatgactagatctcgtgataactcactcactatctcgaggactcaccaagccgtgagggatccatccccatgacccaaacacttcccactaggccccacctccagcattggggattataattcatcatgagatttgggtggggacaaatatccaaactatattacttgccttattatgttaagggaaagaaaccattcatacattaaatccatttatatgaaattcaagaactggcaacacaaatctggtggtagaaattaaaacagtggtggtctctggtggaaattttctagggtgatggaagtattccataccttgatttagatgttggttatatgggtgtatacatttgtctaaacgtgttgaatggtacacttaaaatctgtgcatcttactgaacataaattataattatatctcaaacaaacgaacaaaacaactttttctctgtccttgggaagaagagattttcccactcttcttcattgtaaagaggtagatggctggggcccccaggaagcagttaaatgtggtagaaaacacattggctttggagtcaggctctgattctgattctattttgccatttgtggccttggacaagctgatctccaattttctaatctttaaaatgggctgggagagtgttgtgatgatgaaatgaactaatacagtaaagtgcctggcatatagctggtgcccaagcagctccttctgcaggaagccttccctgacttctccagacctggtcaggtaccttcatttccacacaccagccttgatgcatgtgtcattcaaagccgtgtgtcaacaacagtgcagatctttgacagtcacagacctttgtgggtatttactgaatagtcaaacggcaaatatggaatctgcaaatgccaagagcctactatattggaacatttttatctttctggtccctactctctcctaggctttcagatcttgagggtacaacgtggttatttctcagctttgcttctccccagctgtcaaaagtgctcaataaatatttgaccactgagtaacttttaagttactcatgcatgagtaattgaataaatgcatgaaagaatgcatacactagtgaatgtatgaataatagaatgagacaattagtgcataagtgggggaaataggtgaatggtgaatcaagaaatgagtagagaattaaaggagtgaaggtgaaggaatgaatgaagcaaagctggttacctttcttccaaagggctatgtgctggtgacaatacaaatgggcccattccagagccctggagagagttagagctggtccacctgacagacagccacgagtgacagcccagccactggggtcctccaaatgtactcattctggaaacttctcctttccttccagccactatctgccacccctccatggagctagggacgccaagggactgtgaggcagggcatgactccagggggcagagagctaagtgcatggctgtcctctctcttcccaaacccttgtcacaggccgtgagggcctgctgcctcccctgatgccatgttcctgagcagatgttcctcctgtcttgtcagcaacagagcggctgtcaggagtccgcattatatatctgctcggtaacgtttactgggatttagtgtttaacaactgtcactccaatatatcttttcttaatcccttcagatctgctgctgtagcaactttaaatatttatcaacactgttcgtgtgttcgttggttgggttgcaattttcttgtaattaaagatttacaagacactgctccagacttaggaaggattggtagagagcaaagagggaggggaggagagctctggtcttggaatctgttgtttggaatccaaagctagaattcactctcctgggagaggtggaagctcattcactggttcccataagccctctcctttccttctctttcacacggccccatgttcaaagtggacctcacggtaagatacagaccagggtgtggttcttccttcctctggagtccctgctatgtgccaggcaggggctaggtgctgagggacagcagggagcagacagaaaaggtccctgctgacatggcgcttccattccagtggcagagacagacaatacacaaggaaacaaagacatgttttaaaatcagtttagattttgaaaaatgcagatgttgactgaggatgggaccttagtatcagagttctttattgcaagcaatataaattagttctggaaaacttaagcaaaaagaaatttctggaaggataaggggagttctcaggatcaaaggaaagaagaagagagaaaaagaataaaagaaggcacaggaaccagtgctattttgggcatctttatggcaggcactcaaagacagtctcttcagggggtggccactgggacaaatacctcccaacggtgttctgggtttgtgatactttgtttaggattcacagtccagggacaaaggccctcactctttggccaggggagagcaggatgaagaccagggacttgtgattgacagtttcatcaggactgtatccactgggggaggaggagttatccaaagcaagatctggcgatgccgcaggaaggggctccaggtgatggacctgggcatgctgaaacatcagtgtgcactgtactgcaggccattctaagctgtaaccaggacaaagataggagctgggcccatgaagagctgggggaagagagagccgcaggtgcagaagccccgtagtgcgaaagagctcagtgggttttcaatggccaaggtgctgggttctgctttcccccacagattgagcttgaaaaataagcctatctgcagttctcagggtctccgtgggccatgtctggggaccaaaattttgtttattccaaatggaataggatagaaggcccagctctagagggcttctcccagctgctgtgacagggaagccagtgagggtggaattctagttaagttgtgtttctggaggcctgcagtggaccaggtgttaggttctgtagaacaaggatggaagggatatatctacagctctcagagcacttaacttgtgagagaggtataaatagattacagcagggcagtgatagaagctggagagttgatttgaaaccttcttttgcaaaacaggtttaatgctaccaatttctccataagtactacttttgtggcatcccagggttttgttattgttgttattattgtttttggttttttagagacagggtctcgaatctctgttgctcaggctggagtgcggtggtacaatcatggctcactgcagcctcgaacgccttggctaaagccattctactgcctcagcctcccaagtagctacgcctacaggtacctgccaagtgcctggttaatgttttttatttttactttttgtagagatgggatcttgctctgttgttcaggtggtggtttcaaactcctggcctcaagtgatcctcctgccttggcctcccaaagcgctgggattacaggtgtgagccgctgtgcccaggccaatcccagagattttggtatgttgtgtttttgttttcactcaattcaaaatatttcctaatttcccttttccttggcctatggattgtttagaatttgttatttgattcccaaatatttagggattttctagttacgtttctgttattgatttctaatttatttccgctgtggtcagggaatatatttagtgtgacataaatccttttaaatttattgagttttattttatggcccagaagatgatttctcgatacgagtttcacgaagacttgaaaagaatgtgtcctctgttgttggatggagtgtccttgaaatgttcattaggtaagttggttgatagcattcaaatcttctatatccttgctaattttctgactacttgttctatcaactattgagagaggatattaaaatctctgactataattaagagttgggtttgtccatttctccttgcagttctatcagtttttgcttcatgtattttggagctctggtaaaaagtatgtaaatgcttagaataggtatacaataaagaactattcagcctaattattaattgagaaagttgagaaaccagggtctagggctaattattagccactacaaaagcaagactcttgtatgtactttatctaatgccccatgaattatgggactttctagtctggcctgtaggaacaggcaccattcctagcttgtgtgagtgttgagcactgttccctttcattattattattattattatcatcattattattattattattattttgagacagggtctggctctgtcgcccaggtgggtgtgcagtggtgcaatcatcactgcagcctcgacctcctggtcttgagcctcctcccacctcagcctcccaagtggttgggactacaagtgtgcgccactgtgcctggctaaactttcatccttttttttcttctttcttttttttgagatggagtctcactctgtcacccaggctggagtgcactggtgagatcttggctcactgcaacctctgcctcccgagttcaagcgattctcctgcctcaggctcccaagtagctgggactacaggtatagttcagcttatttttgtaattttagcagagacggggtttcaccatgttggccaggctggtctcaaactcctgacctcaggtgatctgcctgcctcagcctcccaaagtgctggaattacaggtgtgagccatcacgcccggcaaactttcatccttccagatgattctttccccagcctcgcatagattcctgacctacatgtgctgattggtactcagctgaatacataaggtggggactgtctctttagatctccaggattctctctctgtgcagtgctttcctctccagttttctttcctgtgaattctagctgccttgtagctagaatctcagcattgtctcctccactcggggaatccatcaggcctcacgtgggcccctcctccctacctggaagggggcctggaaactcccttaagacagtaagctggggcaatcacaggagtgaccttgtttctttcccatctctcagggattattgcctttcattatctggtacactgtatcttataaatggttgtttcacagattttgtcgcttttggttgttttaggtgggagggtaaatcctgtctctgttactccattttggtggaaggtcagtctctttggatttggtagaccaattttcagatgctgtgtggaacttggggcaaacccaataggagaatcccagtggagatcctgaggctttgtttctttttttttttttttttttttttttgagatggagtctcgctctgtcgcccaggctgtagtgcagtggcgcaatctcagctcactgtaacctctgactcccgggttcaagcaattctccagcctcggcctcctgagtagctgggactacaggcacgtgccaccacacccagctaatttttttttatgtttttagtagagacagggtttcaccatattggccaggctggtctcaaactcctgaccttgtgtttcacccacctcggcctcccaaagtgctgggattacaggcgtgagccatcatgcccagcctgtttctttctttctttattttttttattgcctattctgctcgtgtagaaatcccgaggctttggaagcaaggacatactctctttctcaggtgattattctccttttaataagtagtttaggctttttattggccctaataaactgaacccctgaccgttggacaccacatcagcatgcaacccaagctactgctcatcatgaaccatgccatgaattcaggcatgtccggccacactccataatcaagtgcaagtgatatgagtgggactgggccaagcaggtaccaatggctggtgtaaatgggatgagctactcacttaagctccagtgtgcctacttctgctgctctgctgcctctccctcaatctgcatctatggctgcatgcagagttgactgaggaggaaaacacccatgactgctttgcaaaactcttcatgatatgttcgtccccactcaaagtaaactgctctagccttctagctccattcagaagagcctccgaagtagagaccagaaatccttctagtgggctgtgctttgagcagtactgcttgttgactgctttacttggaaggagagatcgactgaggtaaggctcttactaatgcacgtgctttgctaatggtttggccagatgatcaaaaatgtggaaggggtaagattcaaggattggtgacaaggaagtttagaataacagagatgtggatgggcctcctagaatgaccaaagaatatgagaatatttatgtttcatgtgaacattcatcaagctcctattggtagtcaggtagacaggtagacaaggtggtctactttgaggatgctgattaatctcttcctccagtgacgcagggtttgctcagtgggctcatggacagagtggccctgatggctcagtggagggcttggtataggcttagccacatggactcaccaagactaacctggttacagccgttgttgaatgcccaacattctacagcagaaaccaaccctgagctcctgacttggtgccataccgtggggggaccaacctgctgcttcaggcccggttggttatttgagattccactcatggaagagttatgctttgtccttctgaaacatacactccttgtggaatgacgatctctgccaaccagtcatttttgtaatgatggggccagcctgcagaccaatttttgttaccttttttttttctgcccaaggaatagatatatggtacaccaggctgtgacagatagatcttgctgcaatgggcttatcatcaaaagggtccagagacagcctgtgaagtggtacatgatccagagtcagctacaggaagaaatgaataaccaagtcttgacacattcatgctttgcacggggctgtgtttgtcatgctgatgagggcatggcagtgtggcagtgtgtgcgtgcgcacatgtgtgttgcatgccaacatttcatctttctgatcagctgggtgcggttttttttttttttttttttttttttttttttagacggagtttcactcttgttgcccaggctggcatgcagtggcacgacctctgcttactgcaacctctgcctcccgggttcaagtgattctcctgcctcagcctcctgagtagctgggattacaggcgcctatgaccatgcccagctgcttttttgtatttgtagtagagacagggtttcaccatgttggccaggctggtctcgaactcctgatctcaggtgatccacccgccttggcctcccaaagtgctgggattacagtgtgagccaccgcaccccggcctggggatggctttaaggcaaggaatgagtgaggtagtgaggcagtctctgaccccttgtctattcagggtccagcatacattctgtcacaggggtagtttcatttgttggatgaggaaaagaaaaaaaaagaaagaatgaatgtatatgtcctttgagtcagatgggaccacagagattatctagttcctcctcaaccactgtgggagtctctttgttgatatccccgactggtagccacctaacttctgctttttatttgtaataatagttagtgtgaggcactccagtttatatgctttaatctcatataagcctcaaaacctgaggaggtattactacatttatgtgccaacgaagaaactgaatttccggtaacttcctcaaagtcacacaattagtaaatgacagagccaggaattgaagccaggtatatctgactctatagcttaagctcttaagcactgtgctgtactgtcttaataaatactgtgacagagctctcaccacctcacaagacaccctgtgttatcgttagccagctttggctgttagaaaattttcttccattgagttgaaacctccctgtaactcacatacactgttctaaatgtctcctttcaaacctctgagaaggattcccctccccaattccatgtgacattcctacactgtctaaggatggctctcttccatcaaggatggaagaatcctatctagtagacctgtatgctaagaacccttgctgaaggaactcaagtttaccaatgtccttagtatttggctctcaggctatggaaggcgaaggtggaccagtgcagaacgtttcagtaccattacctcctgtgtagacactgcactgttattaataccatttcacctcgcgttagcatttttggcaagaggagttattccactgcttggctgaatgactgtggagcttagctcagagcaggaaataatatgagagggcaagaacagcaggctcccctgggtctggccggagtcatgtgtgattatggtctctgagtctaagtgctggggcagtgagggaggtgagggaggtagtgcacgaactgggggctgctcctggtttgtggggtgatgcttgacaatcgtttcttctagaggggagctgcagtctggggggcatgtacacgtgtgtgtgtgcatgtactggcatgtctgtgtgtgtgtgtgtgtgtgatggagcagggtcagttcctagaacagctgtggagcacctgtcttagcctcacctatctgggcctttctgttctcactttgggtgtgactgaatttcatttcactgggaaaaccgtcttgcagaccgaactaactctgcgcacgagatggctcccggatcctcccccattattctgagccccagtgcaaagagatagataaggaggctgcacctacctggatgcccagcaggtccaaaaggccagctctggcagcctgcagcacgcctgtgaggactcacctgagccccaggcctctgcgctgcccgggcttgtccccccaagcctgtgcgtgtgcgctgggggttactgctctcctcccatggaaatggccttggatttcctctaattaagacttaacatggctcctgacagacaggaagaatgagggtgagaggtcctggatactttatctgactttcctaagtcccaaaatagggaagggaaggggagtcaaagtgtattcgggggacgacgggacggtgggcgcagaggaaggatgggtggggctctgctcttcctcagccgccaccttgctctgtcacgtccctcttttctgagggacccagagtggccattgcgagagggagtctgaagagctacagtcctcagagaccttcagagactccagctgggcctccccgcctggaggagggaagggaagttctgtgttctttctcatcacaggcatttgtgctcccgaagcatcatagctctgcagcctggtgttttgcctgtaactggagaaatgcttgctgcaaagcaattttatgtgtggtagtagaaagaggctgagattccagtctcagctgtgtgaccgtgggtagatcacctaacctctctgagcctcatatttcccatctgccaactgcagagacaaatactgctctgctcacctcacgggattgtggtgtggatgggaaaagcctctgtgaatggctttccaaatgtgggggctgtagggacgaggatgactacagtggtggtgatgagcatgttagcactgacatgccagtttgccagcgggtggtgggctgggagcttaccttttgttaccacggcttgcattcagagttgtcagttttaatggctattgtgggagacagggtcctttagaaaaggacacgacgatgaggctggcgccaggtcaggagtaattaagagcatgtatatgtgcatacctgcattttttttgaggggagtgggctgggagtaccttcgatgctagataaatctggccagactccagccctggccaggccacctggccacctctagtctaggccctttggcatcagagaaccctgacttacatgattactatgaaatttgtaaccatctcgctcccttctcctcaatggcacagaaaggacttgctatgctctgccacggtgggactgcagggcctggaagtccagagaaggatggacttgaatttcccagctggctccagcctaagaggacactgggcagcaacattttctttctaaactgaaaggtctcctttatgttctgggatctctgatccagcgatcccagtctatccccgggtcatgggtaatgcctgaggttggccaccagggcagggagggacccagcagacatctgggactagggcaagcatcttggacttccattccaacattgcccctggctagctgggtagcaaaggtccacatttcacccacctgccatgggagaggttggtgctagaggggagagagggcttgggctcgggaatacgatagactctggtttgaatcctggacctggcactgggtaaatcacataaactttctggacctctgtttctttgtctaaatgtgaggttaaaactcttgaccacggcacagaggatgtttcgggcagtgaaagtactctgtaggatactgtaattaatggtcgatacatgtcattatacatttatccaaacccacagaatgtataacatcaagagctgccctaatgtgaactggagacttcgagtgacaacaatgtgcccatgtaggtcattgattgtaacaaatggatcactgtggtggggcacgggggaggctgtgagcatgagggcagggctgtgtgggaactctctgtaccatctgttccattttgccctgagcctaaaactgctctaaaaagtaaagtccattaaaaaacaaacaaacaaacacaaagcaaaataaaacaagatcatgaattattcgtgaatcatgaattcagaattatacttagtcttcttgtaaaacataattttgtatactgctttagatgacacaaacgactccctacctcctgggatttttgggaggattgaggataatgtgtcataaacaatgtaataatgggggcaataataataataatccataatagtagctctagttgtacagagacccctgcccacccctcccatcctctcctggacggcatgggagtgaaagggctaatagatgtggaaattctttgggcttccgcatgctgtttttagttaaaatgacatgacaatagtacttacataaaattttctaatcctttgtgtccctagaatatgaagctctggtgccctggggtgagcacgagcacttctagaggcaggctttcctcccctcctctcccctgaatcattgctcttcccgtctgaatgttcccagttcagggacttgctgtttatcagccacaggaaaagattcaggatgcaatagggtagatttttgtcttgctaagtctccatgctccacagggaatggccaattagagtccagcccagactcatacatcactgtcacacctggctccttgggcctgggggccgggccggctcccagggaggcatccatagatcatagccatctcctagcaagaggaagaggaggtgtgggtggggtggtgggaggtggtgaggtctggagggggcagaacatgatctttggtcggaagctggaacgtcagggaggggcttgaagaaaccatgaattcttcattactaagtgccttgtggcagggtaaagccagataaatttaaatatgcccatcacccagagctttagagcagttttccaaagaaactcaagggtttgtgtttcatttgtgtggtccctgccccttttttcccctacccttattatccataattctggggaggcactaaaagcaaagaaagaaatcaaaagctctggctgatttttaacttgatatggtggcaggttagagccctctgtggttgtgtgggtgcggggcgggggggtaggagtctgatgcccacccaccactcccaggtctcatcatcctcatggttcagtccttcacacattcactcattcattcactcttcaaaaagcttttaataaacacctacactgaaccaggccatgttctgggtgctagggaaagaagtggacaagactctgctctcttcatggaaccgagtattctaaggacacagccaagtcaggagactacacccctagtataataagtcctgtggctgtactgagaagaggtcctgactcagaactggaggacatcatggaaggcttcctggaggaagtgccatctaggctgaaacctaaaggatgagtagaactaaccagatgaaaaggtaaggaaaaagggtcgtgtggaggagaatgttccaagctgagagaacattgtgtatgaaggcccaaaggagacagcaagtgtggtttgttctagcaactgaaacacatttgatgtggctggatctcagagtgacgggagagccagcatgagataccgaggccaggtcatgcagggctgtaattgtgcaaggcatctggactttagtctgaggacagtaaggagcctcagaaacgtttaaagccaggacatggtagcaccagatttggattttagaatgagactattggctgctgactctccaccacaaagcagagaggctgggttggaggatatcatggtggatgggggagaggtggtagtggcattgcacctccacgcctgttcctgcacttccacacctgttctcccaagtccagactctcctttcatctccttgcccttgctgtggaccacgcagccaactcaggaggaggtggtaacccactgcttcctcatcccaaatctgtctcattgctgtgggagcttctacctgagaccactgctcttgggtatttgttttactccttgccttggaagccctggttttctttgttcctctcaggcctgctggaggtcatgactcctcaggggctggataatggccatgagatttctccagaaatgaaaatagggggttctgaagagaaggcagagaagggctgagattgcaggccaaacccgactgaggtcttgggttctcatttcaagtccagaggtgctggggcagctcctagttctcaaagactcaaacgcaaagcaggtggagaaatggaacccttgtgcactgctggtggaaatgtaagatgatgcagccactatggcaaacaataaaaaatagaattaccatatgatccagtaatcccgcttctgggtatatatccaaacaaatggaaaacagagtcttgaagagagatatttgcatacatccatgttgataggaaccttattcacagtaaccaagaggtggaagcaacccaaatgcccattggcagatgaatggataaacaaaatgcggtacatacatgccagggaatattactcagccttaaaaaggaaggaaagtctgacatgttctacaacataggtgaaccttgaggacattgtgctaagtgaaataaaagacaaatactgtatgattccacttacatgaagtatctaaagcagtcagattcatagagatagaaagtagaatggcagttgtcagaggctggggcttgcggggatggggagtggttgcttaatggatacagagttcagttttgcgaaatgaagagttcaggctattggtttacaacaatgtgaacatacttagtactattgaacacttataaatggttaagatgataaattttgttatgtgctttttaccaccattaaaaataagaagaaaagaaagtagatgatttacattttttaaaaaagcaaagcagggctgggcacggtggctcatgtctgcagtcccagcactttgggaggccaagcgatcacttgagcctaggagtttgagagcagcccaggcgacatggtgaaaatctatctctacaaaaaatacaaaaattagccaagcacggtggtgcttgcctgtagtcccagctactcaggaggctagagtgggaggattgcttgagctcagaaggttgaggctgtagtaagctatggtggtgccactgcaccccagcccgggcgacagtgtgagaccctgtctcaaaaaacaaaaacaagctgggcgtggtggctcatgcctataatcctagcactttgggagcctgaggtgggcagattacttggggtcaggatttcgaggctagcctggccaacatagcgaaaccccatctctactaaaaatataaaaattagccaggcatggtggttgtgtgcctattgtcccagctacttgggaggttgaggcaggagaatcacttgaacccgggaggcagaggttgcagtgagcctgggcaagagagtgagactccgtctcaaacagcaacaacaacaaaaaacaacaacaatgacaaaactaaaacacacacacacaaaccatacacatacacaaaaccgaaacatagaacctgccctttcttttaaaaaaataaaaataaaaaaccaaaaaaaagcaaagtgaaggtaagggtggggaaggtaaggctttggataaaaaaccaaaaaaaagcaaagtgaaggtaaggggtataggaagtgagaggtcaaccctgactcagactccccccatttgagtagcactggattcccaggcactctttcccctgcctggggatgggtggggacccagagaggcagctggaggagaaggccctgggtgcttaactgaaaccaaaacagccaagaatcacagctgccattttccctaactgcacctcctccacacacataccccacttcttctctcctctctgcatgtatttataacttactttccccttggcattcaccttagcctgtttcttctctataaaaatagtggggaggctgagaggtggaaacacagtgttgctttgggtcccgtacccaggaaggtctgccttcctattcctgccacctgttttgcctctctggggtcccactggaggcagaggatgtacgggatgaaagctgggaagcctccctgcccatacagggaacgtcagcatggaaggaaaggctgctaattgctgccgatttccctttcactgagtgaaatgtgactttgcacttctccatcctcctgctggccgaagcagccagacctatgggggaccctcagcaccggcctgctggccacacacccagatgggctggacatagggcatccgggggctcgagtggtttctcagatgtgccctcctccactacctccaggggtgcctctagcccttggcttcctctgccacatggcctggtccattgcatgtctatgttcctgagatcttgaccatatacatcacaatttaattcctcaatatgcctggcatgttagatgtagatttttgggcctctcttgactggagtgtggcgggtatccatataggaggccaacaggaaggtggtggtggtgatggtggatctacatcctcctccaaaaacaagcccactccctcctccttggcaaagccttcgccaaccattctagtcttcttggacctccccttctgaactgttaatctgcattccccttaatctaactcttgatcatcgctgacttgtacttgacatagtacagaaattctttcactggtaatactggactccttaaccaagtgttagactcctggagggaaacactcttcattgcttcctcgattttttgcagcaggatcttttttttttttttttgagacagagtctggctctctcgcccagactggagtgcagtgttgcaatctcagctcactgcaacctccgcctcccaggttcaagtgattctcctgcctcagcctcccgagtagctgagactacaggtgcccaccaccacatctggctaatttttgtgtttttagtagagacagggtttcaccatattggccaggctggtcttgaactcctgaccttgtgatctgcctgccttggcctcccaaagtgctgggattacagatgtgagccacctcacccagccaatgcagcaggatcttaaagagggtccttgttttgcaaaaatattgcgatgcttcattcattttccaaaggcctctcaatttttgatacccagatcgttgacttggaggtaattgtgttgtcatgatccttgttggttttcttttcttcagtttagttggtctcccctagctccttatcttttcaatggctttgtggatgatgtaaaaatttctctaacattgatttcatcaacctcattaaaatctgcattttgggaggcaggatatgcaatttcactttgcaattggcttgtgtatttgtttgtgtggtggtagccacccacaactagcagagaccaacaaagacctttgacacaataggttgggtcaggctaaggctggaattaaaccaaaagaatctattagtgaggggttaagggtaaattgtggttggttcattagtgaatatttttgtgttatcttgactttagcttcccagcacaagctatgagagccagaaagtaaattttcttttttcttttctttctttctttgtttttttttttgagacagagtttcactcttgttgcccaggctggagtgcaatggctcgatcttggctcactgcaaactctgcctcctgggttcaagtgattctcctgcctcagcctcccaagtagctgggattacaggggctcaccaccatgcctggctaatttttgtatttttagcagagacagggtttcaccatgttgaccaggctagtcttgaacttctgacctcaggtgatccacccaccttggtgtcccaaagtgctgggattacaggcgtgagccaccatgcgtggcagtcaattttcatagagaggacctctgtactttgacgggattaacgcacccttgatttttcggctgtattttctccttaccatggaaggaatttggatagctgcagtctagtcgtgtgggaggccaagcctgggatgaggagcttccagagtttagagctaacgagtgggggttacagggcagtgggtttcagttgtctaaggaagaactttctaacaagtagcattgttaagctggacgggctgccttgtgaagtgatgtgctttctgtcacttaaagtattgatgctgggaagagatgatggggaggttgtaaagacaacttctgtggtgggtgggaggtggggctggaggacccttcggaatctgagagtctattattctacatcttttgttctttgttaccaactcctgaggacagcactggatttgactcatccctgcatcccccgagcacctcgtgggtgccgtaaaggcagctgggttgatgatgactgagtgaaggagcgcctgagtggatgagccactgagtgaatgaactggagttcatcttccacgtggtcctcagcatccactctagaagccaaagccaaggttaggcttcactcaggtcttcccatgggagccagagtgagagatgggaccctggggaaggaggaggagagggaggctgttaggatgggggtggctgggtagcttataaagggcgttgtaaatttattgagcacttaattcagtgactctcaaccttggctgcatatgtaagtcacctgggagctttttaaaaggtggtaatgtacgtatctcacccctagagacctggatttaattggtctgcagtgctgagcatctggtttttttaaagctccccaggtgattctaatgcacagccaaggttgagacccactaccttactatgtgccaggtgctttgcatgttttctcatttaatcttcacaacaagctcatgagttacgtcactagctcttggtgtagtccctggaccagcaatcacttgggaacttgtgttagaaatgcaaatttccaagccccactccagacttagggaattggagactctgagatgaggcccagcaacctgtgattttgccacccctccaggtgattctgatgtgtgctcaggtttgagaaccactgagtaaggtagtagccacctatgggtgaggtggggaggtttggttactagcccaaggatgttatagtaagggacagtaagtacaaagctgagacacaccatactgcttgtggggaggtcactagggtctcttgatagcccttggttgactctttctcctcctcttcacttggtagcaaaatttagctccatctggagctcagttgctcttgccctggggaagcaaagggcagaacaccccaggattcactctaaaacagttttattaggtgctgaaaatagcttctggcagatggtgtgtgtagaatggaggactggagtagagctgcacctgacatttacaaagttgtgtgtgtttgtgcaagcacatgtacatgcatgtgtgaacacagcccctgtatttgcatgtgtgcatggtagggtcagagaggttgaggaattggggcagaggcataaaagagcaatggaacaggatgggtgattctaatctacccaagattaaagaagagaagagctttagattaggtttctcatggcacttggctgaatccactgccttcgctgggcacgtggtggtgggacaggtgttgttgactggttgagtgagctctaatgtggctctcaggagccagagacccatggatgatacgggggattgcagtgaaattccagaaagcttggaggttttgatgggctgaaagcttgaaggttaagagccgacataggaggctttgctttgcaaatgaaaacactgggaattcacttcattttccctatgttaaaggaaatgtctatatacataaatctgggttccatttaggtgtagagatggtgaatgttcttcgatctaaacctcgctggcagaccctcaaattgttgtgggtggctctgtttcccttggcaactcccagctgtagtctcgaatcctgcagctgtatgattcccgcaccctttaatgcagtagttcttgacctttctgggttttggacctatttcagtatcttattaaatctaaagtgccctctctccagaaatgttacatctacatgtacacagaaaaatttgtcagcaattcatggaagtccatctttgacccactgactctagtggagggccctgagaaaaatggccacctgtcttccagtgatccttaattcagcccttccctgagtcaggagacctgggttctagttcctcctccatcactcactgtaaaatgaatagaggtaatggtatttgagccattagaaggtaggggcctaaaccagatgtctccttgaggctggcttcagctgagagagcttggattttaccgatcaatggtcttagagctttggaatggtgaagcacacactcagctgtggctcctctgcctagctcagtgccacccccatgcatcctgggaccaccctgtgggctcttgctcctgcctgccacacacgcagctcctataatccccagtggcgtaagcgatgccatctcttctttatcctctgtagttagcccctgattgtttctgttgagtgttacacacccctgagaggagtacacaccatccacatgcttgttctttatgtagaaggtagtgcggtaactgaacagggcatgggaattcggagtgagaggacctgggttctaactccagctctaaccttattagtcgtgtgaccttcgtaagttatttaaatatttcaagcctcagtctctttacctataaaaatgaggatgataatatctgttgggcctaacttactgagctattactaagagcaagtgagaaggtcactatcaatgaacttagccatcctccaaaatagaccacacatgatccttttcacataggttgagtctgggtctttcttccttccttgcaggctggcagcctggcccttttgattcataagggtggcaactaaaagttgaggaatagctccttagcgttctcccaacctactagtgttctgtcatgaaggaagttgccattttcaaacaatggctctttcagagctctgagacatccagaagcaacacaaaccaggtctctttaagtgtgcagtggcactgaaggtgggagtaggaaactatggtgactggaaatttctacaaccaggcggagggttctttggctgggggctgtagataaaggaactgagggaaacacaaaggtttggagtatgtggtggaggtggagggtgggggtactgattcatgtctgtaacagggccacggaaggtcaataagaggcagaagcagcatttggatgaggataaaggagaatggcttgggaggacattgtgtatgagaatgacatggcccacttggctagaaggagaccatggagaccatgttttctcatcgatgctgtaaaataggcatgcagattaggaagcagtgaggggcgactcctgccatctaggcacttgcttggtgcagggctgagctcagcgttaagcctctgatgagttcctgacttgcccagctgacatctaagctcaaaagcaaagaaagcccatggacaaaagctgttctggacttaattctgaccaacaaaagagaactgattgttgaggggagtgatcagagcctccagaggaagccactacagaattttagagttgataggatccagggaatgaaaaggtgagaatacaaagtcagacttctacaaagcatgcttcaaaacttcagagaaaggaatcatcagctgtggttctcaagagaatatagttcaagaggttttaaaactgaagtcctgacaataaagtcacaaattatcctgagttaaaaaaaaaaaagagggcagcctctaaaaataaaagtggctgcacagggagctctccagtgcacacagatcttagaagtccttctgctctccaaaaacttttgacatactttgaaagtatatatatatatatatatatttttaaattttgagacagagtcttgctctatcacccaggctggagtgcagtggctcaatctcagctcactgcaacctccacctccacaagttcaagtgattctcctacctcagtctcccatgtagctgggattacaggcacctgccaccaagcccagctaatttttgtattttagtagagatgaggttttgtcttgttggccaggctggtctcgaactcctgacctcaggtgatctgcctgcctcagcctccaaaagtgctgggattataggcgtgagccactgcaccgtgccgaaagcatataaatttgaatacgatagggtagaggggtgaaaacagggcctttggaatcagacagcatttgaattctgggtctgcctcctactagctgtgcaaccttggatggatgaatcatttaacttttctgagctctaatatctaaatctgtaaaatggggatgattgtacccacttgataaggtaactgtgaatgaaatgaaatggcacctgtgaaattcctactacagtgccttgcatgtagtaagtgcttcatcaatattagcattattgccattctacaaaatataggagatgttcttaaacaaagggtaactgcaaaagaatagtgcaaatgggtaagaatatactggatgggttaaaggacaggttgctctgacacttgtgaaacctgtgaagaacacacaagagttctttgggtaaaatcatcaagaaggaaggcagacgtcatgcctggacctgtcaaagtgttgttgatgctgatggaagagcaggatagtgacttgcctgtgtcactgttatctcccttggaatgatgtgcttcaacaacaaacacaattaagatggagttgaaggccaatcaagatcattcctcaccaccttaagtgagtgtcattctcactgcagggcactgatggagcttacaaatgtgatggcggaggcttgatctacatgaactactttgcataagtactttgaagaatcatggggaaacggagaggagtcagaagactgcaaaagagcaaatgtggcttcaattttcaaaaacaggataaaggatagatttagaaagtacaaaggtgcatttagtgtccatcctggcaaaattctagaggaaattatttaaccgaggtgacaatcctggtagcctcttatctggcctcttcacttctgcacttgcccaccccagactcccatgctctgttctcagtctagcgaccagagggttccctttaagtcaaatcatgccatgtctgctcagaactctccaggggctccccttcttactgaaaggaaaagccagtccttccagtggtctacagggcccaacaccaccacctgctgcttctctgacagcaggtctcatgggtatttttcctccaccccctcttgctcggggcacgctagcctccttgctcttggccttcacccttgccattctctctgcctggatcactcttcctccagacaactgcttagttcactcccccatgtctttgctgaaatgttaccttctcagtgaggccttttatggccaccctatcaaggccccacttatctttcttgacatttttttctccttaatactcatccccattcaacatattacatatttttacttacttctcctgttcattagctttctccccttactaaaatgcaaggtctccagcctctgggacttttgtttgtatccttagttcatagaacagcacctgtcgcatggtcctctttactaaatatttgttgattgcaagggagggaggaagatggcttgggtagacttagagttcactagacaaggtgaccaaccatcccagtttccccaggacagagagagttcctgaaacatgggactttcaatgctaagatcaggagaatcccaactggtcccctacactagaccagccgttcttctctacttctgtgatacggtgattagactgatggttcccaggaatgctacacactcattacatcctcatctcagctcagcctctcacaaagtctgtcttgataaccctacagatgagatgcagaaatacaggctgcaagatagtgtatttgggtggtttgtagctagctgagcggccacaccagacatgttgatgaatggacccatggcaggctggcgggaaggctgcagtggtgagccacagaactgtctctgggcccagttctgctctgtgacctatctgagccatgcatgcggacacagaaggcaggattgaatttgctagtgcactagggagggaaaactaatacactcaacaaattgggttaggttttgaaatcatttcaatagaaaaaaatgataagccatcagcttaaacagaagtaagtatcattttctttctttcttctttcttttttgagaagcagtcttgctgtgttgcccaggctggagtgcagtggcacagtctcggctcactgtaacctccgcctcccaggttccagcgattctcctggctcagcctcccgagtagctgggattacaggtgcctgccaccacgcccggctaatttttttgtatttttactagagatggggtttcaccatattgccaggctggtctcgaactcctgacctcaggtgatccaccccccctcggcctcccaaagtgctgggattacaggcatgagccaccactcctggctgtaagtattatttcctatttaggattaaaagaaaaaaaagcaatctgaaatgtacagaagacaccaggcttaatagctgttttgttttaaacccagtacatttagttgcccacatgcctggtctagtgttgaagctaagacttcagatgttacctgttaggctgtgttaatggacacatagagccagaggagggcaggggatagtcccactgtccttcctcctgctcgaaacacaccagagccacatgtccagctctgtaccaggggaggggctgctcatgttcagctgctccatttctggctattccaggacacagcaacccaccgagtgccttgtcctcactctctccaactggggagtgcccctgcggtgtcatctctctttacagaagagatgccatgagctactttcctttccccacctcacctaacttctctgctgtagcctaacagtccaggacctggggattcaggtgagacacagattaagtccccataactgacattttcttctgagaagaaagcattcacattcaaggacttgagcagctctgagccccatggcagctgagatgccacagtgcgtcaagtacaggcacatggcatctgggaggcagagctacatcctctgggttggatgatttctgcctttccccaggggttcacagcttgcaatcattctgtaactgaggagtctggtggaaatgggggtagcaaagagatcagagcaggcaaatggtcctctggggctgggaacactccctctttctaccttccaactgcaggcacatgtacgtgtcttttcagcctgagggatctaaagccttgggacttctggatctgcaagtggtccctgttttggtagctattgactgacgaggggctcttcggtaagttctggggtggcagtggaggtgatgatgggagggtgttacagggctccacaggctcttacagggctcgggagcttatttaagggaacaccttgattgtccatgtgtcgtgggccagagaagaaaggcagcactgtggatcttctgggaggaaaggagaggcgtcgatttctgactccagttttctatgatcagcacagactctgtcccacctcctccctacagagcttctggatcctggaggatggagaataggctaaattgcacaggccagctccagtccattggcagggctgcctagaacatggctgtgatgatcccaaagctcaatagcagagaaccctgtggggtgctaggagtgtctgccagggtgccgcagggaaaggggagcatgtgtgtagatgtagaaagcatctctgccatcccctcccctaaagaatatataacatggccatgcagaaaaacacttgtgaaaggagctgctgccctcaggacagcgtgtcattgaaatgggggctgagcaacccgtcagaagagtggggaggagggaccatcctccagccccttcccagctctcttctggagccataagccacaacactgtctatgaaaaagctgaggcctagagcagaaggagtgcaaaatcccagctactgcaggcctacgcccagtggttctcaaagtgttgtcctcagtctagcagcatcagtgtcacctgaaaactggttagacatccaggttctcagttgttatccagctctagcagatgggaaacgctgggggcgggaccagccatctgtgtttaacaagccccacaggtgactgctgtagccttgagtgaggacctcggccaaaaagaaggctcctaccgtggctgtttgctgatggtcttcgcagagcctgctgtctttgagcttcctgagagagggacactaccctcgcttaggtgagtgctccaggtccatggggcctgatgctctgtccctggtctggcttccgcccatgtatacatttgcactcttgatggtggcttaggatctgcttccaacaagtctgccaaatgtgctctgtaacacagggggaccctccaaatgtgcattgctttctgtcagtctcaggaaacccattcccttcccagcctatctcagaaacggagagtggtggctcagtggcctctggctctggcacagccccttgatgggtccacagtggcccctctgcccttggctctgttggcttcccaacagatgttcctcttcacatgtagtcctaagaactcaatcagtttaaaaacaaaaaaactaaaaaagcaaaccatgctcattgcaaattataccaaaatgaaatggacagatagaatgcagtaatttccttatcccatagccctcccctccctaaatcctctatcaccccatgccctgctcctgccctagtgagccaaagttcttgctgtcttgatgatttgcaactctctgcatgactctgcctcttgggtttgtttaattagaaataggctgggaagtgcttcctatgctctggcatgttaattgcttatcagagaaggagaaggggtgacggcatttggtgatggaaatttccgctctccccatctcaggttcgtctccatggttctctcccacccctctccttgcctcctgcgctctgcctccctcccttcctcactctggtcgttgtcacagccacagagactcttgggggccagaagcaggcccaggggccagaattcaaaccgaaaaggaaaaactgtcccctctttcactctatcccttttcttgtccctcttctcatatcccagctggcccccatgcccatcaccctccaggctctgaggagagtccagagcagagctccttaaccacactcaatactcagaggattattttcctttcgttcctttcccccgtattattgttattatttatttttattttttacaaaacaggagaaaagagtgaatcgggttgggggaggtgacacatttctccacaaaggtacaaaattgcctatagaaagtcagcttcggaatgccgagcccaggctgctgagatgaggcgttcctgggcatccctctcccaaatgtccttcagatctggctggggtcactcccacattgagggcagccccccgaggtgagatggagtggcctccttcagcccttgcccaggaggcacaagagcaagcaactgagactgtacagagaaagagaagaggaaggggtgcagcccggggacacaggtaggggacagccaagccaggcccaggagcctctgggcagagagaagatggggaggcaggaggctctagccaaagtccctcctgttccttggagatgttcctcagaatggcagcagaggtgaccctaggaggtaagggcaactttttcgaggctgcagaagcacccccagggccacaaagccccatctgtcttggcccagctgccaggcctcaagcacgtgggtccatgtccctttcctggcagggcatctggcccagactgcttctcttttggtaaaaagtagtcctagtgatttctctactgctgagaacaggctgagcttcaagaattttgagacaatggtggcaacagtgtctccccttctgaggatctgggcagcttcctccctggattccagggcaggacgaggggagcagacacaacccggacagaaggggcactccagccccagaaagcccaggctggagggagaggccgcctcccacccacacccttcctgggttggcctgtgccaaggtgggccgctagcccagctgccaggagaaggacagcgagagccaggatggcaatgagcccaggacggtcccctaaggctctgtggcaagaagtggcctctttggtcctggcccatacacaagccaactgggtgtgggcatcagcaaaggccacttgcaggcaggcccagtactccgtggcctgaaggaggcgggtaatgttgtagctgtgggttccccgaggcaggcgggccagagctgtggccccctggccccggagggaggaggcactggaccaggtgaggttggtggacactgtgttgggtggggtgacccaagatagcaggatgtgataggggtgggtctcctgcacccggagctccagcccctgtccttcgtccctgcctggctggaggagagcacggcccacaaccacactaaccgtcttagtgtcagcccccaccaggttctgggccacacaggtgtatagccctgcctcttctgctgtcaccctccgcagctccagggtcccctcggggtacacccggtacctcctgcctgcatgggcaggtgtcagtcgaagcccagctggagtgacccagtagatctcgggttcgggttcggccagtgcccggcaatgcagcaccatgctctctccactggctacctggaggcttggggggaagcttcgtggggagatgaggggcaaacagtggtccgtcatctcccggaagggcacctcacggaccgggaggcgctggaggtccggaggctccgcacacagggtggattgcggctcgatgaagcggacacgggtgcccgtggcattggcccagcggatgacacagtcacagcggatggggttgccgtggagacctacctcctgcaggttgggcagggactccaccgtctgctggtgcaaggcactgagagcgttgttgttgagcatgagggtctccatctggggcaggtggtggaaggcgcgggggtggatgaaggacagccgtgggttattggtgatgtccagcttggtcagctcggggaggttcaccagggcaaacttgtcgatggagaccagctcctccatgttgttcagtcccagctccttaaggtgcagcatgttggcaaagtcccccggccctacccgctggagcgggttcttgttgaggtctaggaacttgagcccgggcacctgttccagtgcccgcctgggcacccgggccagctggttgtcatagaaggagaggctctccaggctttgcagcccctccagggcatagtcggagatctcccgcaggttcatgcctgctagcaccaggctacgcaggttggccaggggccggaagttcatgtccaggatggcatctaccttgttgccgccaatcatgagtatctccaagttgggcagcatttcaaaccagcggctgtcaatggccctcaggaggttggagttgaggtgcagccgcagcaagttgctgaggccagaaaaggccctgggggcgatgcggtagagctggttgtggttgagatagagttcctgtaggctggccagccctgcaaagctgtggtcctccagccgggtcagctggttctcctctaggtgcaggctcagcagctggggcagggcatggaaatcacagtctcgggcatccgaaaagctgttctgggacaggtccagctctgtgagattggccaggtagcccagctcactctggtccacacggacaatgctgttgctctgcaggagcagggtctgtgtgcctgcggggagtgccggggggactgccgtcaggaataggtcattgcagtccacagtggtagcctcgcggtaggacgagcggggcgtataccagggccggatctggcaggcacactgaggggggcagggaacatgccagggtaccacgggcacagcggcagtggcaccagccacccaagctagcaagagtggggccacgagaagcctcatggtggagctgcagggcaggggaccattcacaagaagagtctggagtcctgctctttgtgttttgcagggtaagggtcagcaaccctgccagggcccaaggaaccaccctcccagggcagtcattctacaccgggcgtcacttcttgccctcctcaatatgccttctcttccttgtcctctggggctgggcctgctcagtcattgccaggccccatcaggggcagccctggaagaagaggatgcagagttaaggaggttgcagagaagcagtatctacccctcctcccgtgtttgtttgtttgagacagagtctcattctgtcacccaggctggagtgcagcggtgcactcagctgactgcatcctccgcctcctggattcaagcgattctcctggctcagccacctgagtagctgggattacaggcacctgccaccactcctggctaatttttgtatttttagtagagatgggggtttctccatgttggccaggctggtctcgaactcctgacctcaagtgatctgctcacctcggtctcccaaaatgctgggattacaggtgtgagtcaccgtgcctggcccctcccatgttttttgactcaacaagccaaaggagctgcagaggtaatggccaggcctgtccttaaggctttagtgtccttttctatgacctgctcacagagtgagtgactgtgagtcttcagtgaaggagaggaaggtgtatgtgtgtgtatgtgtgtgtgtacatgcacatgtgtgtttgggagggaaggagagtggatgggctgaaattattgttatcttcagagtccttctgagcccagagagatgtgaggtaggttctctaacctttcttacctctttcctcccagcctccttggctcactgggtaaatggaagataaaatgataagtttccagaagttcctctggcagtgtaggtgggaggtgggtgagggttggtggaaataagtacagcttctaaaatctgggatgggctccccaggaccctagaggtgaaaggcagcagacctgacacatccaggcaggctggggtgttctgctgcccaggatcttctgggtggggatattgctttggtgtttgccaacttccccaccctggaggcaggagtgtttctcctttcccaacagcctggcagtgttgcccaggaggaggcagtggagttaagaagcctgggtctgagctcctcagctgtgcaggtaagaccttctgtgacctggcccggccccttcacctggcttctcttgtcaccaccccacttacccgctgcacacaaaccttttgggttgaggttaccgtgacatgccaccccttctgatgtctcctcctcattgtcttccagacaactcctacttgttcttcaacgctcaactttaagttcagtcaccacctgcagaagtcttctccaaaacctccccacctggctgactaaggggctggctttatgctcttgcagtactcatgcttcctactgtcacagttctgaccacaccgtgggaaaacgtctctaactagagacctgtcttgcctcttgtgcctgtagtacgggatgggtgcccagtgtgtgttgattgtatgaatcaatctctgtgactccagagttcctttcttcaggagattagacatcacccctgcaatcaacaatgcaagccactgctgtttcctccatcctgagcatgaggaacctatccagtttctctctcagatgccagggccatgaggcaagtccagccttggcctagaaccaaagatggaaacaaaaaggggccagactgtgttgccttcttgagcctggtctgactcctgagtggaagtctgattccaggtaagtttttagctacaagtgtcaaggaaatgcacaaacacttactgagcacctaccattgctcaggactctttgaagactctgaatgtcttttttcatatgactctcataacaggtacatgagataagcactaatacctccagtttgcagattaagagactgaggtcctgaagaggttaaagaacttggctcaagtcacatagctggtgagcagcaagatacaagaatcaacccaagtccagggggctgtgtgccgtttacacttcacatctgtgctgccaggtctgtctgatctgaccctgccctgggcctctggagggtctgggatgcactgaatgctgcagctgcaggccctgtgcctgttctcgtcccctggggtgatgactccttaccaggcagctgcagaaagcttggagctatgtctcctgccaccatccaggcaggtgcctctcagcgggccagaggggctcttcacctccctcatcctgcttccaggatgctagggcttgggaggggagcagctggaggcagggtcccgttccctgagcaggaacacagcaagcctatttacatttggctacttcccactttcctctgcagctatttctgaaggtgggaaaaacaaccgcgacttcaaaggcacagaggttttgataggggtgtgtgtgcaccgacacgtaaaactcagtgtgaacaaacacatgtgtacacatgcatgcatgcctgcatacctgtgcaaggggaacccagctacccaagccagtgtatgggggtcaggaagcagggagggaattttgtggtggtctaggtgggtggaaaggaaggagggaacaagctgagtctccgagaggtccctgttgtggaactggatctatggccagtaatcctgccacacttacataccagagacccctgactgccacctagacctgctgtgagagagcagacctaccggcaaatagatcaggacccaaatcgcggccctaccactcactacccaagtacctgaggcaaagctacttgactgctctgagcaaccatttccttctgtattacatgagattgtcattggagttaaatgagtgtgttgcacacagaaagaactggacaaatgttagctctcttccagctccagtcatccctcagggtcaggaggttctccagctataggacttcttaggggacaatagaagttggctcctaggactcctagggctcgataagttagcaagtgccatgctagttggggaggcaggttcaaaaacacgaaacaactaggagagcccaagacatttcccaagtggagagaagggtgagggctggaggaggtggagaggggtcttcagctgggccccagcatctccctgacctttagaccctacccgagtccagtttcccttcttcatcaacacttggttctaagcgctgagtccgtgctcaactgcactgaggggatcaaggaaccatttaaaacttcattgaaaccctccaggcacttgcctttccccttcaccccagactgctgccccttccttccctcccctggttgggctgggtggatgaggcagaggtcgtggctcctgggccgggagcctggggctgggcctcgggatccagaggcagtgacttgatgactcatgttcacactgcacctctgaccccaaggcttggcaaaggcccagacaagtccaccccctcactgctgagcatgcagctctttccaggatgcagctcagagctgccctctcacctgccatcaccacctaaggctgccttgcacatggcccgctcatgcaggctgattagcagtttctaccggggagctgcagagaaagctaattgtctttcatctgtaatctccaggggtgatcaggagttcagactgtcacgtgtatactttccccaattggattccgagcttcttgaggcaggggccatatcttacatgctttttgtgtccccagagcaccaagtgtaggattgagcatgtagcaggtgcttgagagttgctatagtgaaatgtgtagagaacacgcattgcatttaatccccccaacaaccctgtgtgtaggcaagaagggattatttagctccattttgccagggaggcaactgagagtcagaaacgttaggtgattcatcagaggttgcacagcttctatgcagtggggtcaggattcaaacccagggtctttgactctacatcctgcctcaccagcccagccaatgtggatcagcacctgttttacaggagcagagggcaaggctgcctcagttgcaaatcccttcagagaaaacctgagtcctcagctcctccacgcacctgccccctgctgggcccctcagctcctgttccttgactcctgcctagaacaacccccctgggggacagtgtggggaaggacactgttcctgtgtgtgtgtgtggctgggcctggaaccacagggacaaacagagccagctgctgcacacagacctcagcctgccttctgaatgggggctgggggctgctttttgcgcagccagtgactgctggccagctgtgggcttcagggacaggagacaaaagccctagagccgtattccaagaagcagggttggttgcccactccaagggcaagtttctctcttggaaaggctggtgctgcaaaccctgtcaggtctatgttctcggggctgtttctgtggatttagcggaaactgtggaattaatccacaatgcccctgattaaactaagacctttggcaaaggtctgaaggaagagttttggagacgctgtcactactttctcccttccctgcttctcaggcccccggccccagcacagccctagtgctcctgcctggtattggtggatgcagagtctcctctctcctctcctcctccctcctctccctggcggttccccccccacccccccccccgggagctgagggtccagagggagggtggcaggtggtgatcgattgcctggccttggctgcttcagtgccaggacacccttctccccacaaagctgcggagagagatgggcggcataattgagtgtagcgttgataaactccggcctcctcaccagcagataagcgctgggtgggagggatgctgagggtgaggaaggccagtcctccatctgcatacctggcctccagctcctcctgggaggtaagcctggcccctcacttccacctcccatttaatcacacacaaccagaacctcagagctggaggagacctcagcctcagcgtttatctgctcttccagagtctgaattccataaataacttatgtgaaggaggagtggtggggcgtgagcctggctctgctgtttgctgtgtgaccttgggcaaagtacttaacctttcgagccccaaatccctgagctgggaatggggataatgcctgcaccccttctggaattgctgggaggagtacgggatggaaggtacatgaagtgcctgttagttccctctgttgcttcccagcattgcagcctctcctttcatcttaccatacattggattggagcaaaagtaattgcggttttggccatgaattttaatactaatactaatacctaatacttctcatctctcaacttttgtaataaacttaaaaaatattgttgaggtataacatatgtacgggagaatacataaatgtccctgatcccaacatgcataggtacaagtacaaccaccacccaaatcaagacataaacatttccagcactccagaaggttcctacgtatgtgccccttcccagtcaatatccagcccccacctggagctaaccacggtcccgacttctatcgccgccaagcagtttcatcttgaaaacccagaattccccttccttttccatgacaagttgggaccagggtctttggaattaggttactctggcattagggaactttaaatccacttcattcctccccctacttcaaagtgggctatagcgtcttagaatctcatgtttaaccagtgatctccaggaagagaggctgattcttctctctctttctagagttcccgtatctaaaaattgctctcagccttggggcccagctctggccagcatcctcatggcctgggcctgggagtgccatgctgccttgagggaggatgatgtgggtgacctcctggcccccgtgccctctaggccttctcatcacagagttctggagcactaggcaagaggatggattgggggtggccaggaaggaggggcccagacctgcactcctaaccatccatcccctgggtcactctactcggcagtctcagaggctcctcccattctgcttgtcctaaatgcaacatctcctcccactgcctggctgtgctgcattggtcccattgccatcagcaccaccgtccaccaaaggctggaaatgcccgccctcttcatctgccctctcccacctcacaccccctaccaaaatgctcacacctaccttctcttttcacttctggccttgtcctgtacggtggcctcttttgggctttcctgctcacctgagagagccacacttcccctgactgcctctcattcccagacacaccacaccctggctatttttccttccacaccttgggcctctcactgtgcctgccgtgccctttcccaacttcaactattcaactcctcttcagccatgaaaacccatcccaaatgccacctcccctgtgacgctttcccttagagaagagtggttcctcccacagctgcccccgagactctctgaacaaaccacagtggcaacttcctcactgttaggccatgagtctgtcttcccaaccagactgagagctcctcgaggaaaggatggtttgttacggatttttgtgtccctagagcctagtaccgtgcactttcccttgcaggactgaggggtgctctgccgtgaactgtgaatcacaacccattagtaggtcatgaaaacaatttaacgtgggtcacgatctacattaaaaaaatgaatagaaaatatcatactgcattgtatgcggccagactaagcattgttttgagatgctgccccctattttatacacacgcatttgtgcactgggacatgatacaaggctttttcttttttctttttctttttttttttgcctagggctgtagctataaaagcttgaaaaccattactctgagaatctctctgttgggaaaatgagtcccttcaactctagttgttgccactgggatgctaacagaaagcaaagtctcagaggaaagatgtggcattcctgagtgtcttccatgtaccaggacttctatttgctagccactttatgttcctcatcccatccttctgtgagggacatacttttcagatgagaaacgtaagctccgcgaagctaaggggccggactgaggtcccacagcgagagtgtggaggagccaggatccgaaccccatcgccagcccttgccagttccatgattccggtgccagcgctcgcctgacctccagggctgtcatggtgggaagggactggagggcatctgctgggcaaaggtgaggcttctttgttcatacttgccctcccctcgtctctggaatgagaggggtcagggttccaggaaaccccccttgttgggcctgggaggggagggactgtccccaggcaggaatctctgtcttcccaggtctcctggctggcccaagcagagagtgttagagctctgctgcctggaaggcagcctacctcattatttcttaattaggagtggaaggtgccagtaggtagcacagagtcattgctgtctgcgtgcactgcaccaaaaaaggctgcaggggagccgagccagcctgttgggggcacggaggcagctccaggctgcatctcactgccgcttgctgccagtcttttgctgatcctcagggaaaacttttctgaccccctgcacccatctcctgggctcccatgatgccctagtgtgcctccatcctaaactggctggcttgctgtctccccgaccagactgtgagctcctctgaggcaggaactgtgcttcaagttgccagttcttccaacagtctggacacagtggtagctcagagaatatccggagaaggaaagaaagaaagagggagggagggaagaaaagaaaagcaaggcaggcaaggcaagtggggagggagggggctggctatttcagagctcaggtggctccattgcctatggggtgggcagtgtctgggctcagaccccctgcctccttccttcctgacaggaaagagacaaacatcatcccagagcctgtcttccctgggcaatacccgggccactccagacatggcgtctttagcccttccttggtcactggcccccaggtgaagagagcatttttctctgactcaagttcttgcctctggatttgccaagctcctatgacagtcttcgcccttctgaagctctctcaggctccccttccagaaatcccgcaggttccaccgacctctctgagagcacaggcgagtggttgaacggtgggctttagagacggcgcggcaccagagtcctgtactggctgtgtgatcctgaacctcctcactgagattctcatctgcaagatggagacagacctgcctcatagcgagggggaatctgaaaaagatgtctagagagtgcccggtgctcattagagtgtcctgccctttttatccacttcgatttgttggaggcacatttccctgggggcgcttcgagaccatctttgtactaggccagcctgatgctggcctatcagggtacttggtctctaaggcaggcaacctcttccttggaaccttcccagtgcaggtgacactccttcctaacggagctgccctgtccgatgtcaactataagcactccctgcagtctccaaccggggtcctagttctagtcttccggacagctctaggactcagttcatttaaagatcattggtgttggacacaactctcacccaataaacaactcagcaccagctcctcctggcttaggggagcagctcctctgcttccccacatgctctccagaagggtcaagagcgcccctcccagaagagttctaaatgtcccagctgatggcctcccatagacattccatgctggccacagttgcaggcctcagatgggcagccaagcccagtgctgacccatgagcttctccacctctctgcgtcaggagtcaggtgggggtgctgaacagaccctgtagcatggctcctctagcagtctgggccccaggacatccctttagccccagtggatccctgggacagaggcaagggcggggggaaggggagggaagacccaagagcaatacaagtgatagtctctcctgtcccatgccttcacacatgcagggaccttgccacaagtccccttcctcacctgcatatctggggaattcctttccatctctgaagtcatagtttatgctgcacccctatgtggtctttcctgacgaccaggctctaccaccaactcaaaataatcagtcccttgctccttcctccaccctcaaggatccacatccacaaagaaaatgtgctacatatacactgatatggtttggctgtgtccccacccaaatcgcctcttgaattgtactcccataattcccgcgtgttgtgggagggagataatttgaatcatgggggcagtttcccccatactattgttgtggtagtgaataagtctcacaagatctgatggttttatcagggatttctgcttttgcatcttcctcattttctcttgccgccaccatgtaagaagtgcctttcacctcctgccatgattctgaggcctccccagccatgtggaactataagtccaattaaacctctttttcttcccggtctcagatatgtctttatcagcagtgtgaaaacagactaatacatgcaccatggaatactacacaggcatcaaaagaacatggcctttgcagcagtgtaggtggagctggaggccatcgtcctaagcaaattcacgtaggaacagaaaaccaaataccacatcttctcatttataagtgggagttaagtattgagcacacatggacataaatataggaccagcagacactgtggactactagagggtgtgtgggggggttaaaaacctatatatcaggtatatgctcactaccagggtgacaggagccgtactccaaaccccagcatcatgcaattttcctcagtaacaaatctgcacatggaccccctatacataaaataaaaattgaaataaaaatccacatcaaatacaatgctcatcttctgtctctcagactgcaagctgctcgagcacggggacagtggctttatggccctggatgaacagagggaagcaccactgctttcgaggtgaatgaggccttagttaaggaggtttgggtttcctgcctccaagtgtcagtggtactgaggaaaggaccctcagggaagggtcgggtgggggtgggtgaggcctggtcggaggggctgggctctggcggctgaggagacagggaggcagagaatggggagcagcccagttaaacatggagaaaggccaagccccttctaacggaaaaggaaaataaaatcagaatgaaaattgatgaggcggagagaaaaagagactcatttcatcagcgggtttgccagatgaagctctagataagtcacgccgcggaaggagtcctggtctcgggggcgctgcctgctccctgtcagctgtccaggcagcccggagataaatggctgcagctgaggcccgggtttgtctttcctccccactaaccgcaagacaatggcctgtccgtcctggccacctcctccaatgccctggccattcccttccccaggacctctcctgtgcccctccccagtcccacaggcctctccctgggcagtccctctgcactcccccttgccagggcaggccggtggacagtgtttctcagaggctgcttcctgccttccactccttacccatctccaaagccagatgggggaagcagggctggtagatgcagcatgggacaggactggctctactcctggcctggggacagactttggatggtgtcttcttccttctctaggtcttgggtttctcatctgcaaaatgagggagttgggctagagcagcggttctcatactgtagtccccggaccagtagtctacgcatcacctggaaacttgctagaagtgcgagttccttggcccacccaagacctccagaatcagaaactctgagggtgggccctagtctagtcacctgtgtttgaacaagctctgcaggtggttctgatgcatgctgaagtttgaggattgctggctagctcatctctaacctcctctccagctcagattagaagtctacaaaccaagaagagtgatacctagagtgttctatatatatatatatatatatatatatatatatatatatatatatatgaagagctgcttataccctgacagattaggttgggttttcaagactcccctcacctcctctgtcctggccacaagggaactcttatccattgagcatgaaatagatccctgaccttatcccaggcactgtaagtatgtgagggctgcaaatacaaagttatgaggagggcaggtggggattcacaggttaaaaagaaaactaaaccagtgtaccagaggatgataaaagttgtcacagagcaagggcagcagggcacaagctaggggagacagcatgattctacctcatgtaggaagttagacaaacattcagaggaatttactaaaaaatcactgtacactaaaaatggctgaatttgatggtatgcaaattaaacttcaataaagccattgaaaaattcacaggggtagtgttgctgggaatccataggccagtaatgcatagataggagacactaggagcaaaggtcccaagattcaaacatatgaagtgagttccaagcagtgagtggctccccgtgggtcttgagagtgtgggtgatgtgatgaagatgttggagcagcaagccagaggcagaatggtctggacacaatacccaggcagaggccagccaaaggaggcatataaggcagtaaccagctgggagcagtggctcatgcctgtaatctcagtgctttgggaggccaagggaggctcatttgagtccaggagtttgagaccagcctggccaacacagtgaaaccctgtctctaccaaaaaacaaacaaacaaacaaaacacctatgtgggtgtggtggctcatacctgtagttctagctacttgggaggctggggtgagagaatcgcttgagcccaggagttcaagcctgcagtgagctatgactgcacaactgaactacagccttggcaacagagcaagaccctgtctctaacaataaaagcaaacttaaacccaaacaaacaaaaggcaatagctacaacagccatcaataataataggctgttcagatcaaatgcaccttgcaattaaaattcttccatattggccgggtgtggtggctcacacctgtaatcccagcactttgggaggccaaggtgggcagatcacttgagattaggagtttgagaccagcctggcaacaaggtgaaaccccgactcaattaaaaatacaaaaattagtgggcctggtggcatgcacctgtaatcccagcttctcaggaggctgaggcaagagaatcacttgaacccagggggtggaggttgcagtgagctgagatcatgccgctgcaccccagcctgggtgacagagtgagactctgtctcaaaaaaaaaaaaaaaaaaattcgccacgcgcagtggcccacacctgtaatcccagcactttgggaggccgaggcgggcggatcacaaggtcaggagatggagaccatcctgactaacacggtaaaaccccgtctctactaaaaatacaaaaaaaaattagccaggcgtggtggcgggcgcctgaagtcctagctacatgggaggctgaggcaggagaatggtgtgaacccgggaggtggagcttgcagtgagtcgagaccacatcactgcactccagcctgggcgacagagcgagactctgtctccaaaaaaaaaaaaaaattcttctgtattcacaatcctatgttgctatggtctgaatatatcccacaaaatccatgtattggaaacttattccccagtgcaacagtgttgggaggtggggccttttgggacgtgtttaggtcatgaagaaataaattactgttttaaaagggcttgacagagagaattttttttttttttggtctgtctaccttctgccatgtgaggaaacagcattcgaggcaccatcttgaaagcagacagcagccttcaccagatgctggcaccttgtcttggacttcccagcctccagaactgtaagaaataaatttctattctttatgaattacccattctgtggtattctgttatagcagcacaaatggactacgatctatgtgattctcacggtagccctctgaagtcaaaggggccattatcctcattttagtggaaagaagataagtgacttgtccaagatcacacctaaacaagtaatgaggctgaggccagaagatacagtatgcttccaagtccagtctttatttttccagtgagagggcaatgataataatggtagtcattgactgagcactgattagtagccaggctttgggctaggtgcctcaccagagtgattgtgttgaatgctcacagtaagagcgtgatgtggaaattactagccccacttctcagatgtgagaagtaaggtaccaagcccagaacattcagttggtaaagccaggactcaaacttgcttctggctggccctaacacctgtgctctaaccccgatcccacatcaccctctccagtccccgctgcccagctctccttccacttcctcaagcctggaatagaatgaggagatttccagttgacttattcaagctccgttgggcctgggccaacccaagagaaagaaactggcccctggcctaagctcggcagcccttcttcaagagaacgccctttccaatctggcagaggcttcctctcctccacacccatccacgccttccaagcccagtgtacctgctgcaggaccagcggctcccagagcccccaagcctgtggaaggaaatgcttccatctgtgatcaataacaggcataattcaatgactgcggcaagtacaaaagagtgtaggttaaatcaatatttagaagctttgaaattaaactaattaagagcaagccttaatgatttttactgtctgggaataaaaaagacaaaaagcccacctatatttcatgattttactttagtagcttgtaataatttgggaagagcagaaaatgaaaagtgctctcagccagccctatgtcctgaattgcaggggaggggagcacctggtccttgggaatagaagacgtggaggagagaatgaatgggatggagcccgctgtgcaaacagcatgttgtaaaaggcccttggcttggaagtcagggactgttatgggttgaagtgtgttcctcaaaaagatatagtgaagtcctaacccccagtacctataaacatgaccttatttggaaatagggtctgaagatgtaatcatctgatgatgaggctgttatggaaggccctaattcaatatgactggtatccttataagaaaaaaaagccatgtgaagacagaggcacacaggaaggtgccatgtgccacggagacagatggaagtgctacagctgtgtgccaaggaacaccaccaattgatggccaccaccagaaagcaggaagaggcaagaaagaatcctcctctacaggtttcagagcgaggatggccctgccgacaccttgattttgaacctccagcctccaaatctacaagacaatatgtttatgttgttttaagccatccagtaacataggcatcctgagttctagttcctgctctgctacttactaactgtgcaagcttgggcaagatgctttatttctatgagcctcagttttctctactgaaaaatgggactaagactagtactatcccttttttacagagacgtacagctcaaatgaaaatatgagtgtgaaatatgcatggtgagctgagaagtgctatacagatatgacctaggctcactgcatagtggaaaaaatctgggaagggattcaggagctattggtcaggtgggcaggaagtttcctgcctactcacaggaccattctaaagatccgatcagatcacaggtgtgagttcactctgctttgttagagatatatgcataaaagatgtttttgttgttctcaacaaggatcttatttgctgactactgaaccctagttttctcatctgtaaaataaaagcgttggacaatattattttaagggtattttccagcattattctctgggcttatatatatttacatataagtaaatattaatatataaatattttaaatgtaatgtgtcttggcagccccaaccttgttctcatccttaaacctctctccgcagcccagtacaattgagagggtgtcatcctagctcatggagagaggtcaggactactctggggctttgctcacctctgctccctgctgcagggtttaagggagagagaaccacagcagttgtccagtcctctcttgagtgtaccaggcatgaagggaacaggaaaccatgcaggcagcaaataaaatctctatcgatcacgagatggctggtatcccaaacccggctggctcccagaaccgttcatcttaaataaatgttcctaatgacccactcatacttaacaccagagctctgtcttaaagtgcagtggaaaagggcagctgagcaaggagctgctgctgctctgctgagcctctttcttggctgcaaaggtagaaggttctcaggtggtctcagaattttggaaggagctgcaccttgcagcagtgacaatcccaaatggaaggaccaaccttcctgccgtgtaacaaccaacattcttccaggacgagcatcgctgcagggaatgagcatctgttggcacatcgccctcacagggacaggcaacagcagcagcatcaccaggaatatcaactcattatcacaatgccatcgtgagatttacctccaccatcactatggtcagcacacctgcagccggccatctctgttaatgtcaccagccccatctttgccatatgaatcccctgctcgctgccatgaccacactcacttaataccttccacgagcatcgtcatctcctccagccactgtcacaatcctggtcatcatagctaccctgatcaccatcagaacatgcgtatggcctcattgctgtgatgcatacagaacctgaaacagacgcggcttctgtaattggtaaatacacattggataatgagatcccccaataatgctaacatgaaaataagtggattcacatgcacacagaggggcacactaaaagaaggatgatcatggacttaaaaatgacaatcatttgcatcccgttatctctgtttttcaactctggctgcaccatagaattacatggggatcttttaaaatatactaatgctggccaggcacagtggctcgtgcccgtaatcccaatactttggaaggccaaggcgggaggtttgcttgagcccaggagtttgagaccagcctgggcaacatagtgatctgaaaaacttaggggcatccgcacagagcagagctggccaactggtcttgctgtgggcagtgggctacaaggtgcatgcctgtagtcctagctactcaggaggctgagacaggaggatcccttgagcccaggaggtcaaggctgcagtaagccatgatcgcatgactgcactccagcctgggagacagagggtgactctgtcttttagaataaataaaataaaatatattgatgcctacctcccactctagaccaattaaatcaatctctgagtagggtccacacacggtgttaaaaaaaacttcccaggatttctttgtaaattttatgtcaaaagaaaaacattgtaagcaaaaattgaaccccatagctgttgatactgaaatatttagggaaaagtgtactgatgtctgcaatttgctttgaaatgcaccaaaattaagatggattgatagatagaggaatggatagttggagagagaggtgataaggcaagtctaataataaggttaatggtagagtctaggtggtgggtagatgattgctcactgtaaaattccctttactgtgcggtatgttggaatttttcataataaagtattggggggaaaatccccaaatggtttgaatgtgaagccaggactgagaactattacttctgaaggaaaaatccataaagcaaatgagcttctttcctctgccgtccacatgtgaaagaacatccctactttctcatcaaaccaatcagatctagcccaatgctttctagcccaatgcttcccagcccttctcaagccagggcacatatagatgagtgtatttgtacagtgcaccaggggagagggtggtggctgctggcagccagagggagcggctcagggagacgcttggttgccccaggccccacagggctgccctgagtgccaagggctgtgcctggagtccactgtccacagccagaccagctgaccagctctgctctgtgcagatgcccctgagtctcccagttctaaaccacagctcagcattcttagcaaggattaaatcctttcccagaccagagtctgcctattgcagcacgtgacgtgtgtgtgtgtgtgtgtgtgtgtgtgtgtgtgtgtgtgtgtgtgtgtttgggggcagtcgctgagagggtggtagagaggactcctctgcgggaaggccccgacccccgggcctcatctgtatgctcctccacaccctgctcaccctgtgggggagtgccatggcaacaccgtgctctttaaacacaggagtttgtgctcccatcgcaaagcagcattaggcaatttaattaaggagctggcagcagacaaactttgtgagttaaaggcattttattaaatcccattgtattatgcagctcaattcccccaggagctgcggagctgggggaggacagaggagaatgtactagggttttcttttcctttccttgcttttcttctggtctccctcccgcctcgtgaaagcattcactgagcgtagggggaccccaacagtgattgcctgctctcacccacccaccccccgccccgaacatcaggccttggcatgaggcctgcaggcagaggcctggggaatataatcaccagcactgatctcacgcactactgttcgcagagccagagcgctgtcatggtgatctggggccaggcctccgacctgctttagtgttcacaacaggactcggctctgtgattttgtgcaccatttcattgaatccccccgcaccgttggagtcagaactactggcacccttattttacaggcaaggaaactgaggcttacagatgtgaagtaacttgcccaaggtcttcctttttttttttttttttttttttttttgagacggagtctcgctctgtcgcccaggctggagtgcagtggtgcgatctcggttcactgcaacctccgccctctaggtttaagcaattctctgcctcagcctccggagtagctgagattacaggcatgtgccaccacacccggctaattttttgtatttttagtagagatggggtttcaccatcttggccaggctggtcttgaactcctgacctcgtgatccacccacctcggcctcccaaagtgctgggattacaggcgtgagccaccgcgcccggccaggtcttctaagtagtacatagcgaggaagcaatcctagacttgccaagaggccatgtggagatctttagggccccatgatgcctaatctgtgccaagtgaagcagggctcagggcttcagggctttcagtgaaatcccagaccaaagaagctgttcatctgcctggctagtgggacgccacccccaggctcctgctcccaggctggggaagggttttgggggctccgtgagcctgctgaatgaccctgccctgagatggccatcgcctggcagggcagcctcagctcccacctttgaaagtctttcccctgtgagcaagtggtggcacggccccctgggtagctctggagagggcgataggcctctaggaggctcctgggccataagggctctctcaacctccctagctggtcagcctggcttgatggagagaacccaggcttagcagcccagagctgtgcattccagtgccaggtccccactgagcaaggggtgacacgtcttttactctacaaagattcattgagcccaatcctgtgtacaggatcacagagatgaataagacaaggtgctgccctccagacatgtacagagaaacatcctcctgggctcagtttcctcaattctaaaatgggagtaatagccgggcatggtggctcatgcctgtaatcccagcacttcgggaggcccagttgggaggatcacttgaggccaggagttcaagaccagcctgggcaacaagtgagacccccgtctctataacaactctttttaaaaacattagcctgttgtggtggtgcacacttgtagtccaagctacttgagaggctaaggcaggaggattgcttgagcccaggaggtgaggctatagtgagctaagaatgcaccatcgcactccaagcttgggtgacagaaggcactgtctctaaagtaagtaaataaataaatataatttagtaatgacatatgccttgtatagctaaaatagatgcaatacaattagctaatttcattaagggcttactctctgccaggcacttgccattcactatctcttttaatcctcataaaactctattatattattatccccattgtgcagatgagaaaactgaggttaaaagaagttaagcctcctgcccaagatcatacagctggtaagaagcaagaatccatgctcttaacaaatcatattatgatgttacacacatacatacacatgtgtatatattatataattatatatattaacaacagctttgaaatataattcatataccataaattcacaatcacttcatatttgaaaagtacattaaatagctggatttgccatggtcttagtccatttgggcagctataacaaaatattataaaccaggtagcttataaacaacagaaatttattgttcacggttctggaggctgggaagtccaagatcaaggagctggcagatttggtgtctggtgaaggcccgcttcctggttgatggatggagggccatcttctcactgtgtcctcacatggcaggaagggagagggagctctctggggtctcttttataaggacattaatcccactcaggtgggctccaccctcatgaacccacctcccaaaggccctgccctgtaacatcatcacactgaggggttaagattcaacacagaaactttggggagacacaaacattcagaccatagaggccaccaaacaaggatgcgttattattatcagatagaagaaacagttttctgaaagtgggacttctccccctcctggaagggcgttcaggggctgtagcaaacggagcctgtagaacaggctgtgcagctccttccgaggagacggtgaggcctggctcctctctcccttccccacctcttttcttgactctcctgtctcttctctaccccttccccatgcttgctttccatccctcaccatcttttctcaccccatgaggccctgaggtttccatgaggttctgggatctcctctactcatctctactcccttgtcccactggcagagactgagcaacagctgcggccactaggtgacaccttcagaagcccccagatggatggtcatgtgtgtggggcaggctagggaggacagagctggttgcaggggaagcaaaaaggctaactcaagaccacacagttccacatcattaccgcccaagtctcccaggaaaacagcagcatttgagggtttggcattaagagagttaatgtggatctaaatccaggagttctaataacagctctagcacttaccagggttaaaaaagaaaaaaaaaaaacaaaaaacatcctgacaaatagagccagggaaggccatgaagagagggttctcatgcctggatgcctgataacaaaaactatcaaaaagattgcaaaaaccacaatcttgcacaaagaccattgaaaccttacacaaaaaatatttctgcaaggacatctgtccacagctggctatccaacctcagactggtatcacccttgttattgatctttgtagcctaggataattatttcaaaacaattatgtaatcctcctcatcttttcttttaaaaatctttgtcttcttttaccttcctgaatacacacatgtagtttactatggcatgcggattcccagtgcaatgctctattccaaaataagtatctttttcttttagagagcctctctgttcattgtttaggttgacaccagctataggacaacctcactgaccccagtttcttttcatctatgaaatggggataaaaatatctgccttgaattttaataggcaccacttattgaatgttaactatgtgttgggcctttcacaaagctttaaaaaaattttaatccacacaacaaccctacgagagtagtattatatttactgatggtgaaatggaggctcagagaagttaagcaactgatctgaggtcacacagctagtacatgtattaacaaaagccacaatgtaagtctagctctgtgtgatgctgaagctgtcacttttcaccaccacaccaactacctggctgtgagagagcctatgggatgttgcatttgaaagtgtttgtaagtgcaaaactccagaacaactaaagcaggggtcttcccccaccccttcacatggctctactatagctcagctggttttctcccagtgaggtaagaacaagggccaaacccactctccaatgctgcaggagctatgcaccctcctctctgcagccagggctgcaggtgtggaagagtgtgtgtgttgtgtatctgtgcacgtgagtgcatgtgtgtgttaggggaggtggcaggcagagggtgcagtggcggaccaggtaaagcagcttggaggggagcagatttggaggctgtattagccagtgctcttgctctcctgggcacaaggcccagatggtgccagctcattttcacagccattttcccagggaattaacagggggaacattctctcctgtaataatgataaaaataataataattaacatggctgtaactgacatttctctagcacctctctccccagacctcaaaactctgggcaaacagcgaatctactggctttatagtcacatccctgggactgggaagccttaggtgttgccagattttctgtcttctccagcttggagacaggtgcaggtgtacatgggactgacctgtgccaggagctactctttgaatgccactggcagaggggtgaaatgaccccaggcagcctgcctcccggctctgcgctcccatcagccctcacatttgggttcatcctgtgcccaggagtagcagggtaggcaaaaaggtgccagctctctttgccaaactttcaaacagtccccaatccaccctctatgctccaccacacagctggctctgcctcaggaagaactgccccggcctctgcagccagcagggaccatgtccggcaggactcatccctacacgggatagctgatggctttctctggtcccagccagaagtcattacccacacaatgtctagtttaaacaagtgattaggcagctctattaagagcacacgtgcttcctgccagggaggaacatgaacctgcagaggtagctgagggtgagagggaggaggacatcagggtcttgcagcaacgggctcttctacaaagcattttccagcccatcccctggaaggtgcagcacctaagtgtttcacaagccagcatcctgaggggctcagagcctgatagactgtttttcggacatggagtcaaatcctgattgtcgggcagcccacccacaccatgacggacatgaagaaccctgagtgatttaaacagacagataacccaaagctctcactttggtcagtgcttcaacctccccacacatggggttgccaacacactcttctaaaacaattacttcatctgagttacatttatttcctttgttttctccaggagcttacgaacagagaaggggtcagaaaaggagacatcgtcagaaactatgtattttataaatgtgttcccccagcatctccagagagaaagccttcttaatctgaagtcctcagttggactgcagagtctgggaattatctgaaattgcatgcaaacatgtttgtttgtgaatgtgagcacaggtgcatttttccggcaagaaggtccatagcttttatcaacttttgagaggggtctgtggcctcccaaaacgttaagtgctgttctagtccttgcttggttctgaagatggtgggttggcccctttccacgaagatgactgcatattttggaattcaaggtggattttgaggcctggattccacccatttgaagagggggcgaggatgaggttggggtgcagccgaaacagaatcatgacagggagtgtgtgccaggcagagctgtggccgcctctaatccagaggcggtgatggagtgccttcctcatcgcctcatttttcccattgtgacagctccatatctactgttccctgtcaccctggtgacagccttctaatgatgaaggcagcaacaatgtcatataaattcctccagaaacccaggggctagaggaagatcagcctcaggaagctgggaaccaaatgctcggcaccacaaagtggaaagaacaaagcctttagaatgtgaaagacctgagttcaaatcctgccctggcctcttcccaccagtgtgaccttgaacaaattactgaacctctctgagtgtcaacttccatattgtaaaatgagaataatatatgacagagttatcatgaggattaaatgtgatatgctggcagagaatctgacatagtatctagcatgcaacaggcactcaataaatgggttccctttcccagcaggcatgggcagggacatgcatgcctctacccatctgctgtaccactgcaatatcagagaaaaggaggtcctggggggaacagctgcttagtaaaatgggagtggtggtcagaagccacatttcccctacactgttgaccacattctaccaaatcctcacacctggccccttctcctccatgaagctctccttacagtgctcttccctgacattccacagttgccatctgggctttccatctgtaccatgcagcctccctccctttctgtcctggtgatgggggaggtcactttctctcctttctcaaagggtagaccccttggctggcctagcagctcccccgacagccccatgcctgcccacctcttcagatcctctcctcctcttctttttcccctgccctggacaggagctggctgttctcttttgtgatttcaggtctttgaacctgttgttctggaatgtctttccattctcttattagggagctcataattatcctccaagtgccagctcagttgtcatctcctttgtgacaccttccttctctcctcttgctcccacaacacctaccctagtttagcatgagccatggcaagtccatctgcctccccagactgagcttctcaagagcaggggctggctgggcctccctcatccctagcatcccctcacttggcatagggtctgcacatggtcagtgctcaataaatgcagcttggggtaaaagaataaacaacatggttcccagggctagcagtgggaccctcttaatagaagcttcctgtaaaggtagcagtccctccccaagggtagctagcttgggtcctgctggagcaggcctgtgtgtagactaggtatgtgggaggttgatggttagaggactgataggctcatcccatctggattccacacctatctactccaagccacagggcagggcagagggctttcgccagctatctagtactttctccaccttacacctgcacagagagggagagggtgaggatggggtggggatgaagaagggaattcacagtcatgagcattgacagtgtcataggtccaactcttgtgtgactggtatacttaaatcattatacagatggggaaactgaggcggcttatttgcccagaggcatacaataagttgcactgagctaaaattggagccaggttggtctggccctagagtaacagttcttttctttataagatgctgccttctgcagaaatcacaaacagcaccccaaggaaacaggaacagggaaaggctcatgctaaaacttgtgtgtgtgttggcatctctccttaaagaatgggtggagaatgggctgggtcagttgctaaggtggcactgggcagcctttcctccatcgtgtctggacatgggtaaaagaatgatttcacagtagggtttaggtcgacaaggcactttctcatatgtgtgattgcatgcggaatcatcatggcaactctctgaggcaggtattaccatctccatgtactgataaggaaacttcagaatggctgtgtattagtccattctcacactgctatgaagaaatacccaagactgggtaatctgaaaagaaaagaggtttaattgactcacagttctgcatggctggggaggcctcaggaaacttacaatcatggcagaaggaaaagcaagaaccttcttcacagggcggcaggacggagtgagtgcaagcaggggaaatgccaggtgcttataaaaaccatcagatctcatgagatttattatcatgagaagggcatgggggaaaccacgcccatgattcaattaccaccacttggtcccacccttgacatgtggggattatagggattacaattcaaggtgatatttgggtggggagagagagccaaaccatatcactatgttagcacagtgatttctctcagtaacaacccagggcctttagagacctgtcatcccaccatgcttggctacttgcaatacctggccaaagtctcaacccccaaaaaatgggagggggaccggaggaaaaagtggtggcaggggaggaagacctccatggtgagaaaagatggggaggggggactccagacacaggtgaaatgggagaaggggcgtggaccaggctgcctggactgaaccagcccatctcattagggacctgactgcctgtattttagatcagaaatacttgacctgacaaaacttgggatttatttccatgctttcttggggtaggctgtgtgcgtgtgtgtgttatttttcgtttagtttttagtgaacgttcttttcaaaaaaactactcttgtttgagttgaaattatggggaaacagggatagtaggcacctgggttactacaacccaggagcagtgcagcccctcagggatggcagctacagtggcagactctgggagagctgggggagctggcagggaggagggagaagttacatccggggaacaatggctgccaaggctagattttctcccttcatgagaacctgggagctgggactcaggcaagattcatgggccagtccaaactgagatgtgctggacaagtcaatgtccaccagctttcaaagattcaatatgaaaaaagaatgtgaaatatctcattcatgaatttgttattgattgcattttgaaataatgtttttgatatattgggttaatatgttactaatttcacctgtttcttttgacctctttaatagggcttgcattatatttctattggacatatatctctatattctaacatagactgtggattagaaagacttaggttcaaatcccacctccaccacttgctcaaggacacttggcaggtgagcccagctacagccaccaaagacaagatgagcccagccatggggaaagagcaactggattccaagccagggttccgtctcaacccagaagcttttacccacttcttgtagggatggcagagcctccacgagtgtggctggcttgacttttgctgcaataggcaagggggtgcccaagaacttggcctgcagtgactgggattgcaagattctgattccaggaaaggaagcaaggaggttaaaaaaaaaaaaaaaaggctagaaagttaaggagaaaagaaggccttaaagagactggtctggcagggttaatagtttctttccttcaatagagatttcatgccacattgaataaataaaataccacacaattgcaaaagatgcattccacagtatattagataccaccacactgttacccacatctgtcagctactaccatcagagtgactgatgacttatcaaaagccactctgacatttccaaatgagatattttgatagaggtgccattcaacagggccaaaaaagcagatagaacttgaatgtaaatgaggaacatttgtcacctttgtctcacctatttaaaggtttcttgtctgacaacaaggaaagggagagagggagtgaggggagaggaggtggaggatgggcaggtaagaaggtaagagggaaggggagagagcaccaactccaaaagagcccaaaggagaagggctggtccctgagagcagtaggaagtgaaagagaagcaaagcccagatggacggctctgatttttatgcggagtcactctatgactcagcaggaaggagcagtatcaagaacaaagaccagagctgtccaaggtggcagccccacatgaggccactgggtatttgcaatgtggccagtccaaatggagatgtgctggacatgtaaatgtacaccagctttcaaagatttaatatgaaaaaagaatgtgaaacatctcattcatgaatttgttattgattgcattttgaaatatttttgctatattgggtgaatatgttattaacttcacctgtttctttttgcctttttaatgcagcttgcattatatttctattgaacatacatttctatattctgacagactgtggattagaaagacttaggttcaaatcccacctccaccacttactcagggacacttggaaggtgagcccagctacagccactgaagacaagatgggccaaaccatagggaaagagcacagggttggaacaggatgggctggggttggcagcatgtgtggaaacagacagtggggaaaatgtgaagaggaaaatgtcagagaggtgcagccaactgcaccttcccacagtgagagagggcctgggcagggtgcagaagaagctgtaacctctcccaaggctgccctcactactgggtacatctcaatgccaaatcccagcatgtcaagagttggaagaagcctgaaagagaatccaatccagggaccccaagaaaataggcccagagccaggaaattccttccatgtgctttccactgcttcccccgcagcacctccagttcgtatgtccactgaattgagggatggtatccaagaagcaaccgctgcataccaacaatgaggtcctcttgtatggccctgagagttttattcaagggaggcttcacctgcatggacttgttaccacacagttggtcttctagcctcgcccccccacccaacctactttttggttaggttggtttgattcattcatccatttatactctgcagctgtgtgctgagaaccaggccatgagctagggatacagaaataaataagacccatccctgccctccaggaccacacagtctagtggttttgaaatgtggagctgttcagaccacagcccccaacccttaaggtggtgaccttccccactttacagctaactgagattacccagtggtggtggcaggcccagacagagatggctcctgaccagaacagaggcctttccactagccgagctgcctccactggcacatggagggagaggcagctgcgtggcgctgggatgaggtcaggccagagtcatcagaagtcaggtggatgcaccaaagcccagaccctggcttcagaaagtacaccaggtgaagggatttgtggaaggccacagagcaaatcagcatcaaagccaggacaagaactcagggtttctgattcctaactaaactcttcaaccagtggcggcgactcaaagaggtgaatgagcacagggccagtctgcagccaggagctgcagctgactcccttacctgctgctgctcaggatgcagggttggttctcgcctaagagcaacctgctgagggtcaggcgctctgggctgaacagccccacattcagaaaccactagactgtgaggtcctagagggcagggataggtcttatttatctctgtatccgcagctcacggcctggttctcagcacacagatgcagtgtgtgaacgaatggatgtgcacatgaatgaatcaaaccaacccaactggaaacgaggctaagtgggggtgggaggtggtagaagaacatggacagggttgcccgggatgctttattttcttctttcctgcatccctgaacatgccaggcattgtgcaggcaagagaggaaagcagtatccaggaaagaagacagacaattaagcaagcaataagaagaaacatgaagggccgtgagttcctcctgggccttgacccctgtgtgaccttgaccagatccttctcctctccaggccttaatttgtttagaggaactggagttagactaaatggtccaaggttcacttcccacactgatccccatgactggcagacatggacgtgagccctctcccggctgcagagaatcatggcctctccccaccatggcagtagggggtatggggagagcaaggccaggcagaggcaacctggcgtgaagaaggcaaacagacactcctggaagcagggtccccagagactgtgcagccagaggtaactggctgtgacaaggagtgagccagtagtcaattccattcaataaaactttgattacctatgagccttgtaaacaggcagctcccctgtgggctgagccggaggtgctctcttcttccctccctctgtcctgccagcacctgcccagcctggccctgggccctgtgccagcccaaaaacttcctcagcctctgatgcaaggggggcagctgagggttaagtgcccactggcaggtgagggctcagggcctaggggcagtgggaggggagggagcaggaatcacttagccctcattagtccaaattaaaatcaggagtgagatgacaattccaatttgcagtgggctaattgttttccctcagaagctgatcattttgcagactggggaaattaattgtttgaagtcccaggtgcattggctttgaacccagcgcaggccagacaggctctgcctttacctcgtcaccacccctcagggacacactcagcagtggcttctgccctttgggattctcaggcagggagagactgagggtcaggggtgagggtaggggtcctactagtcttaccctcaggtgggaagagggaagaacactggcagagaggtaggctgggagatgccagcagctggggcctggcatccaggaggggttgctttgcctacctgatgccacctgctctgcggaggggtgtatgtaggaagcctccttggacctgccagaagttcccacttccactctgcatccaaaagtccctgtaaagttcactcactcattcaacaaacatcaacaacccactgtgtgccaagtgttgcttcaggagggctggggacacggcactgaacaactcaaacacaatctctccgctcatggattttacttggggggatagatggacaataaatgtgtaagtagacatcagagagtggtaggggctcggaaggaatgacagacagcaggagggatggggctccaaagactcccacactctaatcccagagcctatggaatctgtcaccttccagggcagaaggaatcctgcagatgtaattacggttatgaactttaagattagagaatgtcttggattatctgagtaggacaaatctagtcacatgagtcattaaagcagctttctccagcagcaggcagaagagggattccaagcgtgcgatgatctgatatcctgttgctggttctgaggaagctgtgcacaaggactggaaggcaccatctaggagccgaggaccaccctcagctgccagccagcatggaaacagggacctcagtcctacagccacctgaatgagctcaggagcggatctcctagagtcttcagatagagtccagctggctggcaccttgattttggccttttggaaacctggagcagagaaatcggctgagccaacccagacagacttctggccgacagagctgtgagatggcaaatgtgtgtttctttaagctgctatgtttgtggtgatttgttatggcagcaataaaaagctatttcaggaactaaacagggtcagaggagagtgacttggtgctgtgttaacttgggtggcctctttgaggaagggactgacacctggatgatgaggaagcagagtggggtgaccaacttgtccccatttcccagtttcagcatttaagtcctgcatccccccaaaaccccccagccccaggcaaaccagatggcttgtcaccatatggcagaaggaatggcctgggcaatggcttggggaatgagagctttcaggtgagttgtcacaaaaagcatcccaagggaagttctgtcggacacaggagcaggtgatgggggctgctggggaatcgctcagaaaactctttcaaatggggactgagcaactctagctgaggataggtgagaactcccagccctccttccagaaccccatcctcctgctgtagggcctaagaattaccagcccctgcctgccctgccccgaggctgcttcctttctcccctggcccaactcccttccccagccggcccctgccagggcccaggtgtctcccagtgcccgggtaccaggtgcctgctgtggctttccccagtgggatgctggcattctgccaagcagcacacaacaggggaaatttttgaagccgtctttaattagtgagacaataggaggctgggaagcagagaagacaaaggttgcggatggcttcacaccctgtcaaaacagcggctgtgagcctgaagaatgcctgagagagaaagggagacggaaaaacggagatgggccatgggacccttccccctcctctctccccttcgccctctcctcttcaccgccccccccccgcccccccgccgccttcctccttgcctccctgaaccacagctgcaggcgccttgacattaacccacccctctcccggttcagctggtcacctcccagcgctgtttcgagtcaggtaagaggcagctgtttaggagttcagcaaggaggcagaagagcaaagaaggaccgagctaaagttttggctccttgtctcattatctggatgatgcctggcaagttaattgctgtgggtctcagttttctcttctgtacaattagagtaataatgcctactttgcagggtggtggttgtaaagattagagatgtcaaaaagtgccccacatggagtaggtactggataaatggcagctatttctaatatgagagcttgcacctcccatcctggatcccagccctccaatccaatatttctcaaactaagagcgtgcccacgaatcacccagagagcttgttaacatgcaaatacccatcccactcctcagggtggagcccggacacctgcagattgaacagcttccaagcaggtgattccaatgcaggcagctgggtctgcctcctgggaaaagagctagcccagggcagtcctgcaactgggtccatttcagaagccattcccctacagatggagggtgctggcagggaggtgaggtcttgcctatcccaccaacttgctaccttcacgtgggggtctgtcccgggtgcagcctccacatctaagcaaggtgagttggtcctcaggtcagagcttctgcggaagggacctcggtatccacctcattctgcttccttttcaatggaagaagcagagtcccacagcagggaagtgactagtattagatggtgcaaaagtaattgcgatttttgccattgaaagtaacagcaaaaaccacaattacttttgcactagcctaatattaatataagggcacacactgaactctgggcttctgattctcatctgcaagatacaagtacccagctacaagattgctagtccctctcaattcagaagttctaagtttctctaggagttggctccactgaccccaggttgggaaaccgtgaaggaagcctgaggctgattgccttcttgatctctaatcaatttcttcacacctctctgatttctgggccaggacggctgcttctcccttgccaaataatgataggctgacccttactgaacacttggtatgaactaggaactgttctaagcactttacttgtattaacccatatcagcctacaacaaccctgtgatgcctttatcctcatttataaatgggaatctaaaatacagagattggcccgggtgcagtggctcatgcctgtaatcctagtgctctgggaggcagaggcaggaggatcacttgagaccaagagttcaagaccagcctgggcaacatagtgagactctgtctccacaaaatatttaaaaaattagccaggtgtggtggtgtgcaaccttagtcccagctacttgggaggctgaggcaggaggatcacttgagccctgtaggtcaaggctacagtgagttagggtagtaccactgcactccagcctgggcaacagagtgagaccccatctcaaaaaaaaaaaaaaagaaaaactatttagctgggcatggtagcatgcacctgtagtctcagctactcaggaggctgatgtggaaggatcacttcagtctaggagttcgaggctgcagtgagccataattgtgccagtgcactccctctttggtgacagtgtgagaccctgacaaaaaaaaaaaaaaaaaaaaaggatctagagattaagtaacctgcctggggtcaaacagctgaagctgggatttgaatctcggcagtctggccccaaagtctgtgtgcttaaccactgaggaagattgtccttgaagccatacttgtaagtacatgatatactgccaacccaaagtcagtaaggactggtgtaaagcggactggattaagaattagaagacccaattacccgagaaggggtacgaggagccttctgggtactgaaatgttcaaagctgttcactgaagatttatgggtttgaatactgtagacaagtttaatcttaatgaaaatcagaaggcttgggtttgtcccaacggtggcctatttattagctgtgtgactattagcttgttaggccttagttttttcatctgcaaatcagaacaattagaatgaaagcctgctttcttagttgataaggaagttgtacaaagttctttctttgtatagcaggtcccatccagctgtcttgatcctttttgcatcccctgatcaaaaactctccaccaaactctccctggcggtactcatagcatatgtggctacttccatccttccctggaccagaagctctttgattccatccaaacatccaagtcatccaactttgtgctcatgcagaagtggcacttggtagttacatccatcattggcattaaccagtgcgtgctggaaccagcttgccccagtccatgagagctgatggagctcacctcttcccaactccaccctcaataacattacatagtaggttgaaattggctgtgatggaaatactgaaaactatgaaaattggcaaacactacaaatcaggacttcccttcttgccacccccccagcacaacacccctgccatgaacccaaaatgttcctctcaagtaggccccaggaggtttataagagctctgggactaccagtagctggggagctgtggtctgagtgtagctgttctgaaactttaatgggtgcaaaagacattctccattctctagcccctgtggacattccaagctcccccaggccttgcctgaagaaacagctgagtggcagtgggacacaggtggctggacccagctgaggtaagtcctccaagagtggaaatgaggtaagttctccgacagcggaactgaccaccccagcaagtggtgctaaaaccttgatggcatccctacttcaggtctcaccaaatttatgctctacatttggtgggttttgtttttgttttcttgagacagggtcttgctctgtcacccaggctggagtgcagtggcgcgatctggggtcactgcagcccctgtctcccaggctcaagtgatcctcccacctcagcctcccaagtagctgggactactggcatgtgccaccatgcccagctaattttttaaaaatgtttttgtttcttagagaaggggtcttacttatttcccaggctgatcttgaactcctgggctcaagtgatctgccatcctaggcctcccaaagtgctgggattacaggcatgagccaccatgcccagccaggtgaggtttttttgtttttttttttctcctccttcctttctcttcctctctacattcattcaagcaccaattccatgtattttctctgccaggcactgggaatagatacaagatgaacaagatccagcctctgtcctgagggagatctgtacctagcagggcagactgacagactcacaaatatgactgtggccctgggggctgccgacaggacaagggcaccgaaacgcaggataattgtgttcagagcagcacagtggcccccagagctccacgctccatatctttccttccctccctttccttctcttcttttttcttttcttttttgagacggagtctcgctctgtcgcccaggctggagtgcagtggcgcgatctcggctcactgcaagctccacctcccaggttcacgccattctcctgcctcagcctccccagtagctgggactacaggcgcccgccaccacgcccggctaatttttcgtatttttagtagagacggggtttcaccctgttagccaggatggtctcgatctcctgacctcatgatctgcccgcctcagcctcccaaagtgctgggattacaggtgtgagccaccacgcctggcccccctctattctttctttgtctcttctctatctctggcctgcccttggctgtctgcatccacgtgtgtcaaagatatagtaactggtaggtacagtatgacattcttatcgaaaaattagaaggtatagaaaaacatggagaaaatttaaacaatccccttttctacctcctggtgccataaccactgttaacattttgatgcatatcttttcaggctttttcttatgatagtaaatattcttaacaatttgtctctccctgaggttcatgtcatctttcttgttttccaccttgttttggtagagtacatcttttttgagttgcttttgaaaaagagctaagtttcttgaaagtctgagtgtttgaaaattttggcacgaacatttttgcaaatgtttgcatgtctttattgagcctccatatctgacagtttgactggaaatataatttcagactgtaaataacattccctcacatgttggaagacacagttccatgacctatttgcgtctagggctgctgttgagaagtctgctctatcctaaagcctgtctttttcttcctggcttgtggaatcttcactttatacctgacattctgaaatctcaaaatgttgtgtctttgtgagggtctcttcttcattaattgtgctgggcacctaatggatcctcgccatctgcaaagtaatcatcttcattgaaggaaacaacatattttaagtctccaagaacttgttctctgcatcttccttaaaaaataaaaatcacccaaatgtctaccaactgatagatggataaaaaaatatggtatatctgacaggcgtggtggctcacgtctgtaatcccagcactttgagaaccgaggcgggtggaccatctgaggtcaggagtttgagaccagcctggccaacacggcgaaacccccgtctctactaaaaacacaaaaattagccgggtgtggtggtgcagacctgtaatcccagctacttgggaggctgaggcaggagaatcacttgaacccgggaggcggaggttgcagtgagccaagatcaccccattgcactccagcctaggtgacacagtgagaccccatctcaaaatatatatctatgtgtctatatatatgtatatatacacacacacacacacacacacacacgcatatatatggtatatccatacaatgcaataatattcaactacaaaaaggaacgaagtaatggcacatgctacaacctttgaaaacatgctaagtggaagatgccagacacaaaggctacgaattgtatgattccatttctatgacacgtccagaataagcaaatctatagagacagaaagcagactagtggttgccaggatctgggggaaggggagaatgaggagtggctgctgatgggtatggagttttttgggggcgataatgagaatgttttagaattagataatggcaatggatgtacaaccttgtgaatatataaaaaactaccaaattgtacactttaaaatggtgaattttatggtatgtgaattatatctcaattttttaaaaaggccccatgatcttcttttgtgggtataatgtcgtctctcaactctctgaggatataaattgaggtggtgatgatggtttttattttttcttttgctccctgcatagtatttcctttcttcaagtttttatttattgtttattttggcttatgctttcttaacattagacacctcccttaaaattctagtaagccttagccaatggttctttttttttttttttttttttttttgagactgagtctcactctgtcgcccaggctggagtgcaatggcgtaatctcggctcactgtaacctccacctcccagtttcaagccattctcctgcctcagcctccggaatatctgggactacaggcacgtgccaccatgcctggctaatttttatatttttagtggagacggggtttcactatattggccaggctgttctcaaactcctgacctcaagtgatttgcccaccttggcctcccaaagtgttgggattacaggcatgagccaccgtgcccagccaatggttcgtatttacagccgattggaaagggcagggcttaactgagaggaagggggtctcccaaatatcatcacttgtccaactaccagtatttttagacccagctggaagaaatgaccaaaaggcttccccatttggcttggaaactttgagcaaatgctcacttttccaacatactgcctcatctctactcatacttgtacccatatccccaagtcagcactttttgggttcagtctctttggagagcaaagttttcttcaggatgctctagggtaaagcagggacagacatggggtgacatggggtgaggaagggatctgaggtatcactctcctgtttctggccctactccataccctgtcttcagatgccaaccatttctcagcctctctgtggttttatagcaggaatctgcccatttctcattgactcccctctttgggagcctctgggtttttctttctctatcaagccaagtcagttaccttctcaagttccaaaattgtactgacatttcttattcgctttcatctcctcccctgcccttgtgggcctgcatcttttttactcctttacttctagtgtggtttggggaggcagcacaaagcaccagagatgttagtccatcatgtttaaacagaagtccctccttgctactgtcattcaaaagtggcagtcgctggtattctccgtttatcataaggtggcttctgccattatgaccaacctcagtctgacatgaaatagtatgtaatgctgacttgccagtgctgtgagaccagcaggggaacctcctggcaagctgagagttgggtgactttgccctcaatagccatcctcattacatttctcagtcatactttactgcattttatgggggaaattatgtggtagtctctaatccacggattcatgaagggctatgatgtatcccttgagaatgtcaagggcctactgtacctctgtcactatggaaactagttccctggtagcaattaggcttagcaacatccacaatggtgcaatgcacatggattctggctctggtaatggacagggagcagtccctggagacagggccacacttaccctaatgacagtctccggggtcttcatccagcctgagcaccctgcatggagcccggcctgaagtgctccagctcagaggaggaggagggagagggtaagcctgtttggcccactgaaatctggaattattcaagtgctcctggaatggctttccaaacccagcctcccaggacatctgtcttacggccacctaagagaatgaggtttaaggtggtcaacagttcataatctaccttcaggtgtgtgtgtgtgtgtgtgtgtgtgtgtgtgatggatagttcaaaagtcacttgtgtttggctttgaaatgcattgtaggatttttttccccagtgtatttactatgcaaatgagttactatgtgtgaagtgtttaaaacagcctggctcatggtaagtgccttataagtgtttgctattattattactaaaactgtatttagcttggatccatatgaaaacaaatttgcattcctggactctttgaaactcactaaactcaacaaaaaatagtagataagacagagacccagggactaagaactcctggctcattgacccctctttacataatagagaataagccatcatccagatattttgtttattggtttgccccattcactggattggtgaactccctgccaggcccactccttgacactttaccaagaaccaatgagttgatgcctgtaaaggcatctgtgagctgtctctttccagaggaccctcaaggctgcttcttcctggtccagggggtgacagcaggccaagctccatacccttggcttgttcacaggactcctgctcctctccaggtctcccgtccaccctcgtttctccttccagctccaccctcgtttctccttccagctccaccctcgtttctccttccagctgtccttcctcctgtttatagatgtgtctccatctccccttgccttttctgttgtcatccccatcatctcactttctttcttttcctcctctggactgggagttccttaagggcaggtcttgtttatcttgtcagtctgaacacctagaatggggcctagtaaatagcagatgtccaaaatatttttttcctttttggactgataaatcctctttctttattgccttgcttctgaggtatctgccttgtgtcctctactttctcccttctccccgccttacacagacacacacacacacacacacacacacactctctctctctctctctctctcacttcgtcttagagcctcttgggctgctcttctgcctggctgtgcgtgtgaaggaggtggtgtttcccatccttgggaaagcccttctgacctcagtggtggcagggagaggcctaaataagttgcacaactcagaatgtcaggattgatacctcctgatgagaagcaggcttgttctgtgcaatttccatctcatttgtcttttcatttgtagcttaaattggccaatttcatctggaatgtgcctggactctctggcaagccatatactacaaatgagtgtcccagtagctgtctacagagggactggcaggggagtgggcccaggtcctccacagcagcattggtgacggctcctgggcctctggaagcactaatgcttggaggattggggccgaatgtgatctccccaaggcctgaggaggggaggatggaggaaactgcaatgagagggagttagggctaggtcctgaaaaatctggttgattgattgattgattaatttttttctctctctctatcagaagagggtaaggtacatgggatggaagaggagttgtttgtacttttaagagtgggcagaagtgatacaatgtggagcaaaagaatacaaatactccattcacatgaaattcaaaaacaggctaaactaggtctacgctgctagaatgctgagtgtaagagagccttttagggggctagaaatgtcctacatgttgttttatatcttgatttgggagtggtaatatggggatgttgtataccccatattcaaactcaagttgcccacgtgatttgtttgcttcactatatgagttctacctcaataaaaatggggggaaaagtcacaccaatggttttcgaactttcctgtacataagaatcctgtgggagcttatctacaatgcagatttctggccagcctggaatctagttgatctgaagtgctgtcgggaatctgcatctgagtgccccacacccccaagggtgatcttgagacaggtgttccacagaccagaaaagaccacacaggggcttgaacatctgcccagttagatggcctaagcgccatcctgctgggagccatgaggggcagctgggtggctgagggctcccggatgcccttggcagggagggttagaggttgactatgctgcagcatagagaaagtacggtgaggacagcaaaagcggtagcaggaaacgaggggctgctctctgggctaagaaggaccaggacagagagtggatcttctcctcagggatgagaatctctctgagcaaagaatgctttgctgcacccctgcacccctgcacccctgcaccctgggcaccctgccccaggatggctgggcaaacctcatggagtggctttggcacaggaagggtagccactgcagaaagctggaccccagcagatgtggagtttcatggaatagcctgatccctctgcagggtctggagactgacgtgatcagttctgtatctgtatcttcagcaggcaccttctgtccaacaggaagaaggaacccaagactgaagacccacagctaaaggtgaaaccttggggagggtgtagacaacgtggcacttccatagacaaatgccaggatagtctgagcatttgaaaatgtgggcaaatgatgacttgagctgtccttgacttgagggcctgggagagctaggatatagtgagggggagctacatacagggagtgggaaaaggggcaggggcatctaccatatgccagaccctttacaaacaccatcccatttaatcctccagtaattctctggcataatttacttatgtcaactttacagatgatgaaactaagactaagagaagttcaccaacttgtccaaggccacaactcacagtggaatctgaactcggctccatatgactcgagtcccacgatcttttcatgttccctgctacctctccctctcagcctgctacagtgatgggacatttatgaacttgcaaaatgctttctcacaaatgatcttatttgattttcacaaacatgtgtgaggcaggtataagttctgttctatggatgaacaattggtcttcaggtaaagaacaacttgtccaaggtcaaatagctgataagtatctgggaactgggacctaaatacacatttgatgagtaactttgccacaatatcttatctggacacttgaaaacatactccagccctgtcataaacccaggagaatttgaagatgtccctccctacttacagcctggtttcatgatcactagaaacttgtttaactaaactcctttctgttctcaggatggctcaggggactgagctggaaaaaaaaaggcctcagaagggaaatggaggcccagaaagctttggtgagcagctcgagattacataggacatggagaccagaactcatgtttcctcaaatagttcatttccagggggcttttaggctattaattctataatctgccctctgtctgcctcagggactctcccctccaacccccatttggaccatgaactgatgccaatggcaccaaggaagcatcaactgatactgggcagaagggcagggcagtggcccctgggagtcttcatggctcctctggcagaaagtacctggaggcatcagctcatggacctggagcatatcagcaaggaacagagataaactgtaccgcatcaccaccctggcactactcatgagaaactttcccaaccattatgcttggttgacttggccggaaaggagttaacacacaacatgtgaggagtacactgagtagggagctgtgttcttgggtgacctgtgggtatctgggcccatttaatgcaccaagtcttcaaatagtggcagccatcacaggctcttctgtctgcttgtgcatgcacatggggatccttcacttggtggcttctccccaagcaaacgtttttagcccatcctggattctcctcactgccctctctaccctgggaaatgcaacccacattgtccaagtcagacctaattagaccagcaaatcagtggcactcaagtcatcacagcacactccaagcacaagaggaaatgctgtgtaggttatcctgtgcgctgcttgttgtgtctgtttgtgtttccttggattatccattctctgctccctgccttccattacctcactaatggagaggcaggatgcagtcctccacaggccagcattcatcttcccagtctgaccctctcggaggctattacgctgctgtcgcaagatcgacgaggggagaaaaatgaaaacagtgcacagggaacaatggagggcaaatgggactcttttagaaccggatccactgatacgtcaggccaaggagaaatgaccacaagctctgaaaagtggagagctcccccagacggcaaagccaggtgagtgggcttccccactgggctgcccacagtaagaggccaggctggtggggatagaagggtgtctgtctgcagaaggctgggcagcctaggccccacaaaatgagaggaaggttactgaggtcattgctgcccctgcctcagttaaaaaattagaaatcctccccacccagctctgtttgtctccccacaaagcattgcagaagaaaacacggaagccgccagcactattatgcattcatgattccagcttcaaccagtcctctctgctgcaatccctttattcctcctctgcagctgccccggcacctctgcacagtccttttctgaatctgcccctcaccgtgctccccacctgcacgccgtcctcagaacagattgccttgcctgacctcctgaggccgacggagatggtgatgtgacctcctttgccctccatcactgtgcctcccacacctctgcgcagctcgttcattctctctccctccactctgacttaagggaagaggaattttaaaaccaacctcatcccttcccacctcctcaggaaactcactcctttgcttaccctctctccacttttaaaaataacgatataaatgcccctttcgcctgtgattccttctgagcacagacccttcttgcttaagcccctgtgagttaattttcagtctcacagctcttctcaatccaacagtatttttgcagctttcagcctcgggaagctcttgatgggctcgtctgccacgctaccaacttccttcttggaagtccctccccgtcttctgcgtctgccttgtgcccattctccctctggggtcagtcctctgccgtccggcaggcccatcctccactccccattatggtccctctttacagcctcatctggtctctcattacactctgcagtagcctgatggtcagctctttaatcaaatcccattcagttccctaaagtaccaaagttccccatgagtccctagaacagtgtcctaaatcagacacgtcaccctctctaccccaatactggccccacttcctcaccggtctatcctccccagcagtccatttcatcttcccaggtgaggttccattctctttaggaagataatgcttcaactcctcctttgaattgcccctaacttggatcacagatggacgtgaaagaaaaaaaaagaaaaaaaatttaaaaagaattgcctctaacaacagagtgatcatgcattcccgggggtctcagggcgcaatcccacatggctcgccaaaaggccaaaacttctttaaagtctcatttttcctttttatttttttggagacaggttctcctcctgtcacccaggctggtcttgaactcctgggctctaagtgatcctcccacctccgccttccaaagtactggggttacaggtatgagcacccccacagccagcccttaattgctttaggggtgagtcgacatcattagtagttgcttgaggtcaagacccacagttttaccctttttatctgtccctcctacttgtggcccatggtaaggccttgattggccaaaaccatgggttccccttgacgccacagggcactctctgtgaaaggcccaccctggagaccccacttatctccaatgtgtccctggaggctggggttggctctcttgtcacctcacttttcaaagggacagtgggagctgctcaagcaagcccatctcctgggcgctgtgcccaggacagagactagtccaacttgtggttcctttccaatcacttaatcacatttggctcttcacacctgaggttaaggacttccaacagctccacaaatcctctgcaattaaacctcctgaggcccccactgagtgaaaataactcactgcttccacaagcaaaaacaccccagtagacttttcagcttagcatggacactttcggaacccaaccaattgtttctgcagactgcgttggcacagcctgacccagcacctgctgggagggtggtggtacaggaagaagcaggagttggaagggttgctttgcattttgataaaatgagcaacctgcaaattcgatgcaaaatactatgaaaagatggcatatattaatttggaaccaaaagctctgggcattttaggcaataaaatgccagccctgtatgtggtcatatttactgccccaattttcctttcctgatattctaagtaaaacggaaagtgtaagatattgagagggacatattcctctcctgtgaatgtctaggcataggaataagttggtcatgatacaagttatgtaaatataaatgccatctcatccatatcctcactggcaaacatttattgagcacctactatgtgtaaaacaccatgctaggtgctaagtgaagagcataaagtaccctcattcagttgagcttgtacaataaacgtttgttaggtgcttattgctaaacatttattaagtgccacttgctagtcatgtgatcctgggccagttagctttctcacttgcaaaacgaggtaatgccaatgcccttcagtgggtggatggttaaataattgtggcacatccctatcatgttatactacatggtgacaaaaaagaacaaactaactactgatataggcaactacttggatgaacctcaaggaaattatgctgaatacaaaaaaagccactgggcgcggtggctcatgcctgtaatcccagctctttgggatgccaaggcagatggatcactttaggtcaggaatttgagaccagcctggccatcatggtgaaacccagtctctactaaaaatacaaaaaattagccaggcgtggtggcccacacctgtaatcccagctactcgggaggctgaggccggagaattgcttgaacctgggaggcagaggttgcagtgagccaagatcatgccactgcactccagcctggatgccagagtgaaactctgtctccaaaaaaaaaaaaaaaaaaaaaaaagccaacagcaaaaaattacagactcaatgttcccatttatataacaactgtgaaacaacataattatagagatgaagaatagctgagtggctgacagagtgcgagatggggtagcgtggctatacaggagcagcacaagggagtcctgtgatggtgtggttaactagcttgattgtggtggatttacacaaaaccaggcacacacaaaggagtgcatgtataactggtgaaattccgataaactctagggttataccaatgtcagtttccttgttttgacattacagtataattaggcaagatgttggcactgggggatgctggatgaagggtactgtggacttccctgtaaatttctttgcttgtccagttaatccatactttttttaaaaggttaaaaaacaacaatttaaaaaatagggtgcaaaacatacatcatatggttattctgaggattcaacgagttaatataaagcacttaaatagcatctagtacatagtaaaccttcaatatatgttgtgattttattactactacatgcgggacactgggagtgcccatataaatagctcacagtctctgtttttgaggagttgctaatccagcagaagagaaagacccagcaaagagagacttttaatagaatgtgctgactgtgctcagttcatgggaggagttctcagggctttagggagggtttcctggaaaagatgccactagagctgagtattgaagtctggtaagagtcagccaggagaggagactatgaagggcacccaggcagaaggaacggtctgagaaaagctcagaggtgtgaagccacgtgagatggctgagcaactggggacaactgctttaacttgggcatctgggaggcagtgagggctggaggaagaggctggcaaagtaggcagaagccacgccagggagggtgtgcatgtctcaagagctcgcacgttatcctcctggagtctgcggtgagaagccactgtcttccctcagctttgaccatcctcgttcctcactctgtggactctctgggcactcctgttccagagtactccattcctggcgtggaatgaatcctcatagacctatgaagatctgagaaaagcaagaggccagtgctggccccaccaagctaacttggtctgctccaaaccaaactgcacatgacattccagacccaccttcttcccagcccctgtgggtggtggtgtttgtttgtggtgccactcccccttccactactgtggataatttgaacttgcagcagtctcttttctataaagcgtggatatgcagcagtagagatagcacggaaaggccaggtgtggtgactcacacctgtaatcccagtactttgggaggccgaggcgggcagatcatttgagaacaggagttcgagaccagcctggccaacatggtgaaaccccatctctactaaaaatacaaagattagccgggtgtggtggtgcgtgcctgtggacccagctacttgggaggctgagctaggagaatcacttgaacccgggaggcagaggttgcagtgagccaagatcacgccattgcactgcagcctgggtgacagagcgagactctgtctcaaaaaagagcatggaagtggggcctgagtaccaggctcaagtctagctcttcactgatcagccatgtgactgtgggcaagccaccactcctctctgggctgcagtttgcttcactgtgaaacaggcgatcataatacacaccccagcttcctcatgggtgtggctctaaggacagagaaaaaaatcgaacacgataatatatgtgaaagagttttgtaggttgtaaatagtttttcttcttgtttttgagacagggtctcactctgttgcacaggctagagtgcagtggtgctaccctagctcactgtagccttgacttccagggctcaagcgaacctcctgcctcagtctcccaagtagctggaactacaggctctggccactacacctggctaatttttaaatcttttgtagagatggggtctcactatgttgcccagactggtcttgaactcctggcctcaagtgatcctcccacctcagcctctccagagttctgggattataggcatgagccactgcgcctgactgtaaatagcttttcacacgtgaaagattaatgctattgttcctgaaaaatctattggtgaggaggagcctacactggaaactcaaagtgaatgacttttgaatctttggttggggaaagacagggaagggaagggagcaggagtatggtcttctggtctaccaatgccacacacaaggaatagctttcctttcggactttttcatggatcctttttgtatttaaagacctctcatggatgaattcactatcccaagattttctgaagccaaatctgtgccagacaccaatgatacaataatacaacagatagggtctctaccctcatagagtcacagcctagtggcatagatggacatttctctaataagccctaactgtataattagatatcatcatgtgtgttatgaagaaagcatacaggacattgtgagagtgtttaactggggcctggtaaaattctgaaggtacagggatgcttttctaaggaagggctacttgagctgagatctgcaggatagctagtatttagggaggagaaggaagggatgggaagagtgattaagggccaggaaacagcacgtgtgaaggccatgaggccaaaaggagctcagcagtcagagctgaaaaaggccagggtgcagagtgcagagcatgagggaggggagtggggatgcctcagtgcaggcacaggtcagataccacaagggaccatcccactggccatcctaaagagcatgggaatcacttaagagtgttgagagtacaacataatgtgactaggtcagatttgtgtccttaaaaggtcagtccagcagcaattcagagacccagttaccaaagccagggaacattttttagttctcagaagcatttccactcgtttttttttttgtttgtttgtttttttctgacactttcttttcccttggcttctctgacaattggagatgcaagagtggatacagccataccaatgagaaggtgattccagcagcctgaggaaaaggcaaagtcagcctgaactagtgtggaggctgtggagatggggaggagtggagtggatggacccaggtgctgtttaggaggtagacagggcctggtgatgggctggatgtaaggcggtagagaaaagggaagagctgacagtgactcccagttgatggcgtgcagaactgaggtttgaggttatgccattcacaaaacaggcagcactggaggaggatcaggcagcgggtgagaaggcagtgggagatgtagcaggagaatcacgactctggctttcagtatgtcaagtctgaggtttcttgagacatccagcttagtcagctaggcaggtgaatataaggatatggggctcagaagaaaagacaccaactaggaagctgggtgtcatctgcatgtggatgacaacggaagccgttcgtgtggctgagatggcccagggacagagtatccaatcagaagagaataccttgagccagaccataaggaacaccaacatttaaagatcaagacgggaaggatgagtcagcaaagacgactcaggagtaccagagaagccaagaatgtggggtcagagaagccaagggaaaagaaagtgtcaaaaaaaaaaatgagtggaaaatgcttctgagaactaaaaaatgttccctggctttagcaatctggagagctgcttcagcagagtgatgggggaggaagccagactgaagcagggctggggaaggagtgggtagcacagagatggagaatgctgttgcagccaaccctttcagacatttggcttgtacggagaagagagacagtgtggtggcagcaagtggagtcgggcttcaggaaggtttttgttgttgttttgcttgttgaagacatgagaaacttgagcatggtgagaaggctgtttctgagaaggcagaggagaggacctagaacatgggtggtggaagaactggcctgtgatggccatgctgtggcctctgcagacacaggagggaaggaggagaggactggcccagaggcaggtagtttgggggtttggtggggataagttggggagttctgcctggtgacttctctttctctgtgaagtgggaggtgaggtcctcagctgagcatgagggtggaggcagaggtttggggaggaaggtgtgaaatagtcattgtggagactgaggggagacagaaccagaggaacgtggtaggaacaccaggcacttttgaagagcaagctgggttggtgatggtgagtttgtagaagtagcaatctgtttgtgtgtttgtgtgtgtgtgtgtgtgtgtgtgtgtgtgtgtgtcccagcgggtccagattcctgaatgcaggtagaaagaagcagataaagcaattaatccagaacagggacttggtcaaactaggacaataaaaagacagaggctcaagagagtttaggatattggcaggaggattcttaaaaatgatggaccatggcctctatctggactcagagaagggaaggcagaggaaggtaattgatggtaaaaaaaaaaaaaaaaaaaaaaaaaaaagcaaaggtgccaatggagcaaagttcccaaagagattaaagagtgggggtgtcatagaaccctcccactgctaaatttgactggctaaaaaataagtggtggtgtgggagtccttggacaagcaagctgggaaactaaaaggtgtagaaggtgatgaccagaaagttgggtactctgctaggtaattttcaggggatggcaagatacagagtgtgaacttgcaagtgagtggctgagataggtgagcccgtgaagggactgttgggtctggggtagaagaagctgtccacatcgtcactaatctcacccaggatgatggacagacatacagttggaaagggagaaggtctatgggcacacgccaaaggcttccctgaatgaagagggtggctagtgagaataaaggtgagtggggaggatgtcgccttattttgcgagatttggggaataatcgtgtcttagagacattacattctcttgcacatgaagtagcccctccagggtgaaagatcaggaaaatcagtggaagaaggagtcttgagaagaggtagtaggtatagcacaaagccagaagttaggagctttctgtctagtcccaagggcactaatacgctatgtgatctcaagtccttccccctccccattgcttaagtttctcatagattaaaaatagatcgggaggaccggctaagatagggctccccaagtggggctagggagcaacaaatgggtacaggtgtgctgagatcatgaccctttagcccttgggtcaattggggtccctgagccattatcactgtgtttctgtgctataatgtgaatgaggacagtgagaaagcagtgggacagatgctctccagggccccagctatctctgacgttctgtttgcacatctctgtcgcgccgtcttggaggaggctgcatggaggctgatagaagaacagacagactcctgctgcaggcagaagtccatctgctggcagagatagaagccaagtttcctagctccctcttgctctccttccctccctcccagcactagttgagggagctgtgatctgctcagatgcccaggtgagagcaggtgcaccttgctcctcttccagctgatagttgggtggtcaccggccccctcaagcctcagtagcagcttgtgaaagtgaaggagcgaccacccactagttccatcaatcatccgcttcatccagctctaaaaacagactcaccatttctcagaagctgggcagcatatctcactgcacaccatccagacagagccttcacaatgcagatctttctcttagggccagccacttctcagagatccacgtaagatccacatacatggttgaccgagggccaccccctctctgctactagccttccgaagggccctccctctccctctgtcagatgatatatgcttagagaatgcaccagcaacttaaattcaccctaatcataaaacaccaggaaagacccacttggccctgtactttgtgcacagtagatgttcaataaacatttactgaactaaatgaagactattctcaaatatttaaaaaacaataccctaccaagtctatcagaattctttaaattatccatcacattattcctgtttatttgggtagataattaaaagatgactttttaagttctttaatatttattggtacctactgtgtgccaagcattttacaagcatgagctggtttcattttcacaaccctgtgaactgggtgtgttaaacccattttatagataagtgaaatgaggctcaatgagagactgagacacgtccagggtcatagagctgggaagcagaagccacaggattctaacccagatggatccaactttcaagaaggtgctctcttcagcacatcaggctgcttcccacaaacgcacaacagattgcagcatcaagagtgaccgaaagagacagaggcagcaaagttgtatgcaggaagactgcagccacacagtaaacctgaggcttcccactgccttgccctggggaaatcgttctgaggttggctaagctttgccgaagaaaagtggagaggggtctggcccctgctcctctcagcccctgtgattgctaggctggttctccccctccctgcttttccccactacccaagtgatctggcatttcatttagggctgccctgcttggttctttgagtgtgtgagaggcctagaagcagcaaggatctgtccttggatactctactcccacccctctccccacaggaccaagtgactcctgggcccaggtacccttttgttctcagggcccaggaaacagataggagagtggtggaaaacatgagtggtctgacctgccacgtttgaatgcggctgtcagccccccatgcctgcccaaatctgcctgacaggtgagcagctgtgcaccatatctgtctgtccatctgtctccctctcaggggcctgcagagagccaatactcctcagggaggggaggccctggacctgaagcagctcccttactttggatgttactcagcagggactaggaagggtggggcaggataagtgtgcctctgtccccatccaaaatctgacccaccccccaccaccaactgccaagtccccctcactgcctcccctcccctcccctcctcactactctcccagctcttcctgccaagctctgcaaattaccacacatgccaataagtcattagaaaccagaacggcaaatgtgaggttgccatggagaccaacaccggggagctggcagccctgggggccggccggtggctcaggtgtgtttcagggagagctgggaaggtcaaaatgcctggcagagggtatacgcactactggggcactgattttaggcaaggatctgcctctgcctgcttctcctctcccttccctcccacagccctgggtcctgcccacctgcagcttgttatgggtgataaatgctgcataagcttcacgagggcaggtgcagcctgggccagtgggctgggtcctctcctttcccagagctgtgtctccactcagagcaggtggctgtgagaaagcccacctggtgaccagttccaggacaaagaacacggacagatctgagcaacctgggctggctgcggatgtttggagaaagctgaggcccaggaaggggctgaggtcaggactggaactcagagctgctcatcttcctgcgccagtgctcacgtcgcctctgcccagttcttagcacagtgcttgggcctttatatgcacacgtttgttgaaaatgtaaaaatatacacatacaattgttgtaacggacgagttcatgagagaattcatgtaagcatctgggatttctgacaaaacaggagtggaccgtgggttgcagtcccggctcatccactaactcagcatgacctcacacaaaaccactccttcctgggcctcgatttcattgtctggagaattagcaggttgcatttcagacacgctgtatttcaaaccaggcttctcggagccaccgagttctgaagcaatccctccggggtggctgggaggtcagaaggaggccaactgggttctggtccaccgcttggcttttgccttgtatttagtttcctgatgctgctgtgagcaaaggaccacaaacttagtggctataaacaacacagatgtattctcttacagttctggaggccagaagtccaaaatgggtctccccggcttcaagctaggtgtcggtagggttgtgtttctttctggaggctggaggagagactctgtttcctggactttcccagcttcttagacaggaatctagaggctgcccacaggccctggcccatggccccttccatcttcaacaccagcactggcaggtccagcctttcacacatggcattacccagatgctgacttctgcctccttcttccacctttaaaggacccatgtgattacactgggcccacccagataatccaggataatttattcttaagccagatatcagcaatcttctttctcccttgtcatggaacataacatattcacaggttctagggattagtatatggacatcttagggggcccattattctgcctaccatacattgaaaaatggattaacttctgtaaatgtttgaaagccacagaaccagagcgcttcctgttgccatcagttctgatgcactatgacctaagctcttctccttttctccatgggggatatgcagaggaactctgggtctgcccatcagaggtgaatgttggcaggcttaggctgttttgtgggctgtgcagagagatgggtctctatgcccaccagaaaagaggtctccggggaggaaagaatgaggactgttttaggggaatggccctgtctcagctccttcacctccattccctatataccctgaaattcagatgaccctgcagttgtctgctcatttttatttccatgcaaggttacatggagccgtgtgtgtgtgtgtgtgtgtgtgtgtgtgtgtgtacccacccatgcacactttacctgttgcaaaaggcatgccaatctaacagtcataaaggtgagatagcatcttgtctttccacactttgaccttcaacactgtcctcttccaagattcatgaacagtcccagattgtttagaacaaactctagatacagtagctaagctcagaaaacataggatcttagacctttctgagctttgtactgcttctgctagcaactttccaggcccataatgatcaactctcgcctctgcaggtgagacaggctctttcttgaccctgggggagatgatggcctctcattcttccatacagcataacctctgttctcatctctgcaagacaccctctgccaactgcttgggacccagtggggctcaataacttctatgagcaaggtgccctgggcattaatcacagccccggtgttttatgattttatgcaaattactcacctctcttagccttattttcttccctcggtataaactggcagctcattcccattcccacttctatcatatgtcccaggggatcccggaaaagaaatgtgatgaggtaggagaaccctattctctagaggagtggccctggggaaattgagaaaaggaactaacatttattgagcttctactttgtagcaggtactttacacagattagctcatttaatgtggtagttgagaatcagggctctggagtcagaaagatttgggggctgaattctggctctgccacttgctggctgtgcatggcctccaggctttagtttcctcaactgcaaaatgggggaaaataatatctacttcacagcgttatgtggacgaaatgagacaaatgcagtgaagcttctggcacctcataagcactcaataacgttagctcttattattattaacaaccctaggaagtggatgttattaactcagatttacagatgaggaaactgaggctcggaaaggttaagatgcccaagggcaggtggctagggactgtgaattctgacccaatgccaactgattccacttcctctggattgtaagccataaggacaaaagccccagggtcagcctctgcgtcttccagggggttgtgctggggtacagcgggtgtgcccccctttctcatgggggctgggggcagggaggagagcatcgccccccatgtcttgggtgggtgagggcactaccaatggatcctagtctactccactctggtgatctctctctatacttcagaggtgagttcatatccccaagatccagggagaggacacactcacccctcatgggggtggaagtttgctcattttggtgcaattttatttccagttcacaatatctgaaacgaccaggaatgttataggagtaacctaccaaacaggagcccacccaggcagtgaaaggaagggagaagagaagctgctgcagcctgggtagatacatggagcctaagggaattccagagaacatggctccagacaccagtgaactaagaggccgagattcccagcatgcagacctgggacaacggccggagctggaaatgggactccatgaagccagaggacttccaagatcagagatcatctggtctcgggcaggagagggcaaggacactggataatggatttccttctggaaagggtggctttccgtgtctctggaaagagtacagggggcattggaaacccaggtgggaggcagggactgctcagagacagaagaccctgcccttgcacgttgccacgtgggctgccttactcccactcagtgacctcccctccagcagcaccacccttctctcctctcaccctgccagctccaagttctccgtgcgagaatccttcccactgcagagtcgaatctactccattttccaagcctaaatcagccgcgcccccctgaggaagcgttccctatataactcccacacagagctcacagttctgataacatttatagtctaaatcacacagtttagcactcggttttaaatactgtctggtattattccctcattatttcttgtgagtgtaagttctgcctccccagctgatcagtaggtttccttaccagtaaagactgtgtcctgtgcttttttatttccttcccaacctcacaccccacactgcctaggacagtgctcagagcatccttggtggggatgtactgattggctgaaacagctccaatggctgcagagggcaaccaggcagcacttcctgactagccgctgagggaaaagctggaatggatggccaacgaccagtggtgttaaaaagtcaaatcatgccgccccaggctccaaccctgcaagagcccatcttactctgaggaaaaaatccccctcctcaccagctccagacctctcctagagctaacctcctcctgaccctctgactttatctcctgcaactctctgccctcaccacactccagccacgccagcctccacgccgcctctgactctccaggcacagccctgcatccctgcccttgcacctgctgtcccctctgcccagcttgccccgactgtggtgccaccccctcatctctcctcagatatcaccttctcagtgaggtctctgtagccaccctgcacaagataacaaactccccctctcccaactgactcttccatttcccttccctgttttttctctttagcacttaccagcctccaatgtgccatttcctttatgagtctattttactgcatccccagacaataaactaaaagctcctgaagggcagaggtctgtctggtcattcactgctgtctgccctcagtgcctggctacatgcctcacaaatacttgctgaacgaagagactccagccccatcccatgtctgagatggctgaggcctggtggcgctcgagatgggcagtggacaggatgattctgcaggtcccctcgcaatgtagattccaccattcaacccctgggcccaattctgggcaggcactttctcaggctcgaggcctgaagctgtctgagccccagcagaaggcaggggaagaggagtggtgacagccaggcagggtgaagtgtcaaattctctctttcctcctacacagcttttaaatgtctcacttcccaccagctggccctctgtggtcattcccccttctgggcatcaccacctctgccctcccaagccaaagacagatactttcatcgaccacgtttgaatgcttattttgagaacattttagagagcaaagtaacctttgctgcctttcttttctcttcctcctttttccttccccctgaaaagatcagataggacagacccattcttcctggggaacccaggctggttgctaataatcactgccctgcccccttcttccatatgtttttccctgaagaagctgccttgtgagatgtttgtaaataggaacaattgtacctgttcttcctgaaatacacgagtctgccttgttagagctatcccactgacagcacaaatcccaagccttccccatctctctccaccttatctggagtctaggccccattctcacgtctcccagcaagccacccttgcattggttcccaccatgtgtccatgggcactgactcttaaggtccagcttctctgaggatagtggctccatgtggccccgaggcacttagctgagacagaaggaaacaatgttggatcttaaatatcacaccctgcaggagcaggaggaaaaaaaaggtcacagagaccctctctgaagatcccgaaaaggagacaggcagccactggcttgggcagggctggcttaggggactttcttcctggagggagggaaggaggagaatgggctggatgtcccagagcaccctccaggcccaaggaacaccagattccggggtggtgaagaagcaggaggagtcctaaagtcagagagaagggctaactccctcccttggatctttcctagctatatgtccttgagcaagtctgagtctgtttcttggctttttaggttagggataatgagagttaactacctatctaataggggtacttttgaaagcttaatgggataatgcaggtaaagcagttggcacagtgcctggcacacagtaaatgctcaataaatgctgggtatcataattagtgttgttaccacgtgagaggtagaagctgagaaacagttattgccccaggaaccctctgtctgcactttatcttggaactcgcttcaggtccatcaaatgctgagtagcagggaaggtgtgggtgcaagaaacacacagaaaaaaacgaattccaaaccaaacctggttaaactcacctcctaaaaggcagccccctcaggccaaggcgtctcccaggtccctaagaagtgccagaaggcagagtgcaaggcctagcagctctgggtttggagcagagtctgcttgatgcgggcttagaacgtgcaggagcccaaggtcatgaggctaacccccagcagggatgcaccaggtcccctgcaccaagacatgtgggaatgttctgggcgaccagccagccccactggaagcccagctcccagctctggagaaaaagaggctgagagggacgtgtcagcggtgatggtgacattcacaaagagcaatgaacacatacacaccctggtatcttttcatgcacgatacctgtgccccaaataccctcatcacctgtgtccccagacccaccatctctgcctggttgactctttttcaagccttggttcaaatatcacatcatttggcaaccctttcctaatccgcaaacagcaaacagagagtcactttttttttttttttaaagacagagtcttgctctgttgctcaggctagagtgcagtggtgtaatctcagctcactacaatctccgccacctgggttcaagtgattctcccgcctcagcctcccaagtagctgggattacaggtgtgtgccaccacgcccggctaatctttgtatttttagcagagatggggtttcaccattttggccaggctggtcttgaactcctgacctcatgtgatccacccgccttggcctccctaggattacaggtgtgaaccaccaagcctggctgagagtcgcctttttatctgcttatccctatagtccaacacttgtttcattattgtctatgggactgactcccccatctaataataataacaataataatattacttacatagcacttactatatatataccagatactgttctaagctcattacatgtatcacctcatgtagtcctcatgacagctttatgaagtaggtacttttattatcccatttatagatgaggaaactgagacgaagagaggttacgtgacctgctcaatgtcacccagctagaagtggtgaagcctggatttgaactccagctgtgtggctctagaatctctactctgacggtgaactccttgaaggcagggacatctgatctgtctctttgtcccctgcacctagcacagagccaggcacacagtaggtacttagaaaagatgggttgactgaataagcaaatgcctgattgaggctaacttggtgaaatttcagcctctgagctgtaggccacggagacccaggccccgcactggaaagtaacagataaaggcatctttctgactcgtcctttcagcaatctaatcacatgctgctgtcttttttgcatatctcttgtcttcggttttgttttgttgtcttttttagctacttcatttttgtcaaaagtgttttttgtttctcagtttatcttctgcctttgtcttccttctcttctgttccttggtcactctccccattcctgccccattcaagcctccaactatggtccttgtccttccctggagtccttgtaggcttgaaagcttctagtccccatcctttatcttggagcttttataaagagtccaagccatatagattaagaacacaagtgacatttattcattagatgggccatagatcaagcttctatatcctgaccctgagtcaattctacctgaatgcaggtggggtgtgggatgagggacttcctgcctacaagttgtcacatacctgtgtaggatgacacaggaaaagtcattgccctccctgcctcctcattcagggtcccagttccttcaggaagccttccttgatcacttaagaaagcttattcacacaaccgttcagcaaatccttatacatattaatagtctaactgggagataaggccccatgaaaagttaggttagaatgtaagccttagtataagtgtacaagttaccagatgtcacagatatcatagggccaaatcaactgcagatacaagtgatttcaaaatggagatctatatgacccggagcaagtggtttctcctctccaggcctcaatttccttggctaggaaacaggggatggtaatgcagacattagaaggttgtcagcacgactgaacagaataacttttgtaatgttcctcacatagactggtgcataataggtattcaataataaatttgattccttcccccttctctgtctgaagcaccagccttctacttgccctgggctgccagataaatggtgagatgtgacctggtccatcctttcaggtcagaaaagtatcctaaggacaggatgacttaagcggtacctggcatgttagaggtcactcagtgtgataattcactagcattgttcatgttcctcacctctgccccctcaagctgtgggtctttgaacgagcctggtgggaacagagctaatcagctggcaagtccagatacaagtgtggtcagcttgagacatggaggtttgtttaccgctgtatcttcagcttctaaaatcatgagaggcacacagtaggcactcaagaaacagttgttgaatgaatacatttttttaaaagccatggagtttccttttcctttcaaataaacgacataagggtgtggggagtagaagggggaggtgagtaaatgacagggttcaagggacaccagggccaggcaaatgcagctgccaggcccaccagcccaggctcctctgcaaaagggatgcagcaaagtcaacagtgcatgtgctcccactggcaggatgagcaggagtgcgtgcacgcctggcttacggtttaagctgcagtttacaggagaagcagggcaaagtggagacagagcctgggaagaaagggagatatctggggaagaatgaggagggtgagagaagaggaagagcagtgtgagggggaaaagggaagtgaagagtgttagaggaggaaagtgaagagtgaaggaaggagaggaggatgagggggaggaggaagaggggaggcacagggaaaataggatgggaagtgaggaagaactgtgttgaattagagagggaacctgctgtactagcctggatggaattagcagatctctgagatcttactgccactcggtgtttccccgggaggagactgcattagggagagggtgtggatttgggggtgttcctaggtgccagaccctgggcagacctcaatctcccaggcactgaggcctttagttccatgctttgcaaataatgaggacccatcccaggaccagagagagccctccgcaagaaggagaagcctgagtcagcacaggggaaggaagaaggcctaggaggctcagatccctagctctgcccttctgtttccatcgtttcgccacaacagcacctggccaggaaagtgggtcaggccacccacatgtggctttttctggtagccacagggcccaaaggcaagggggctccagtgcccagtgcagagcccacctctaccctccatgcccagtgctcttttttgaagggatctttaagaagcagtgggcaatgggaggagctcctggccttcttattcagggacaaaacgctgggccagagcccatcctagactggcgggaaaggggggcacggagcctgccatcggcctgggtgcatggggagacctacatcttcccctatgacagtgaccaaactggcagggagtcacctctactgccctgacctagggaggctgttctcctcaccaccctaggtcctggagttctcaagcagagggcctgtcagtccatctctggcaactgagcgctgtgcccagcccaccccctccaaccctgccagtcgcccagttagaagctgcgttggctccaacagatgggagctgcggcagcctgaggaacagagcacaaagcccagctgacattttccttcctgttcgtttgggtgggggaggaagggtagggagcacagtgctacccccggggcccctccccaggttccgggtctcctgcacctctttagcttctccgctcggccccagatggagctcagttccctcaccccgcggctcctcgccggctgggcagccagagcctgcgccaccctttgccagcaggacagacggcccacctgtggctggccagcccatcctgtctcctgggtcctgcggtgggctcagagccacccttccgtttccgcttccccctgaccgagtccccaggctgagccccaggccggcccatcccccaccccaaaggtcccatcccaggctgcggtcggaccccagccagccggcccgggaggagcctagctcctggttccagatacttcagacagacccaaggccaccttgtccctccgcacagactcgcgagctccaaggaggagaaagtccccaggctctggagcgcttccagcctgccagtccgcccgtgtcacgccctccctaacctcactgccacctctcggctcctccacatctccagggccccactctacccagcaacagtttgggggaggttctggcctctccaggcgaaggcccaggcgccctctccctggccgcttctgggcattctccagccctccgtccctctgcccctcggccgcctccctctcccaagtctccggctcccccgcaggcgtctcggcggaaggcagcggccggccctcctctggcccccacccgggtcaggcggagctgcggtgccggggcaggagccaggagccctgaggcggctgctccggccgctcccgccgcgtacgcctcggccacgccagcgacctcggtgtccacgattccccggcggcggcggcgctgcccaggtcagccccgaagctgcacactcaccccgtgggcgccgggcaccgtctgccgtctgctgcccgcgcggccgcgctccgctcgccttccgcccggggccgggctggggacgctggtccgcgccctcccgccgcgcgcgccgtctgcacaggccggggaggctcggcgggcgccctccccaacgtggagttatcctgggagcggctccagggcccagccggtgagggcgatggcagaatcccaatccgtccccaccccctctccgcgccctgggcgcgtcgcggccggaggctggcgggcgagagccaggcgctccttgagagcgccgcgcgttcgcaggtgcccggagcaggccctcgcggcgcccggcaccccctccacgcgcgcccctcttcccggcttcgcgctcgccctcctcactcgcttctccgccgctctcccaacctccccagcccactccggtcgcctcctcccagtctgcatgccacgccaaccccctccagtcccgctgccattttaactcctgagtggccagaggccccctctacctaacgcacacacacccgggaggaaggagttgggtggggccagacgctaacgcttgagctgtccttgtgcctagagacacaaggcttggctgagagaaggggcacagcccttgggtccgggaagagaagggttggcttctctcatactgcctcggaccctcttgcaaaggccaggagacgaatggggaattcagcagctttgtgaggacaggtgcagctcacagtcacagcatgcacctaagatcacatttttgctttgcatggtgctaccctcccgaagttaacagtggactaaggaatgtagtggggtgggtgagaatttgtcactgggcccaggcacctctcaccctaaagaatggagtggaagacccctttagttgtcatgcttttccagcattgcatcctgagccgtgcagctctagcattctggaagattccgtcctggctctcaatgaaggaggtcaatttcagtcaggaactggcaggcccagttaggggtttggcttcagggttccccactctgccagctggacatcatgaagactgggggaggaaagtaagaaggtgccaaaggtgggtgctaggctgctgcctggtggcttagaaaagctgggtgactgccactagaggagggcaaaggcccaatgcccaacacccatgccttggtggggacttcagcctggaccactcagaacagacatcacaaactcggctccatggcaggccacaccctactgatgggtctggaccagagcctgcagaaccaacaacaggggaatggatgaggtggaggccaaggtgtggagtcctgtgaggagtggcttccctgggctgcctgccgtcatccagtgcttgagcttctggccctgtcttttccaagggtacagccagtggtgactgccatgcctggtggcttttgtgaagttggcttgaaggtctgagttctgtatgcacagaggggattctcaccttcatatattgaatgagcacatattaagttcccactaaaccacccccatgttcccactctccacccctgctacggagcataatggcctcaaggagctcagagtgacaggttggaactatatgaaaccaattttaatatttcaagacgatggaagtgccatagaaatacaaaaagaaaccaccttaatggactagcattattcacaaaaggtttaacggaggagctgagtctccaactgagcctagttggagggataggatttgaactggaagagaatatggggaccagcaaaggcaggaaagtggagacaagcagagtagaatgggttgtctggagggtagggggcaagggaggaaaattatagagctactattagatgccagccttttctcatctctgtcatcttagactctgagttgactaatatccccttttaacagaccgggggatggaggcccagatcgtttaaggcagtagcccaaaatctgtaggcagaatgtgagacctcattttcacagtgcgacaatgccacattgagtatacagggtgggagcagctgatgaagggcccgaattgccaggctcagcagtttatctgtggacccatcctcaggtgatttgggatgaaagaggcaggaggatgggagactattgaggtagctgttgcaggaatctaggaggaggggagcagtgagaatagagtaaatgcatgggcctttgtaaagaagacttggcagaactgtaagactgactgattgaaaggggtcaaaacttgactccaagcttttagcctgagcatttgagtcccttgtcgagtcactggagccacctttccagtctaagggccaatgtcaatgtagacaggatgatggtgaaaaggaggacattttaggagtcctttaccaactgcacgaccggagagagcactcatgtcagcaccccagcttcccaataactatgcatactcaagtgtcttatctcctaaccagagggtaagcttctggagcctatgactgtcttacaccttaataagataagaccagtcctttatagtagatgtccaataactgattattgaaataataaatgggataaatgcaagtaacgttcactaagtggttgatcctgagtggcaaagcctgtgagatgtactagatgaggcataagggaatttcatcagctgtgagaagaaaataggggaaggcttatcttgagctgactccaaatgtcttagaacccaatgagattggagaaagagtgtagcttttagagctggaaagatttggatttggaactctacttgtccatttactctgtcttgcttcaggcaaagtattgaacttccccagctctgattctttcctgagtaacgatattaattcaagtaatagcagttaacatttattgagcacctactacatgcaaggcaaggtgctagcacatttatgcatcatctcatcaaaaatttgaccaatactaggactctagtgataggagaaaaacaaggttcagtgtttacctaaccagtatgtaacagagctaagacgggaatccagggtcctcaaatgacagagtccaaacaccaagccaagtctccctagcacttctttaggatgaagatagcaataatggaatggattcatacttataggttgctgtgagatgttacagggactatatggctggcatgagcacagtggctggtgcatggtatgtggttgacatttttctcccaaccctgctcccattgctgccattctgagtctcatactttcctgggaaaagctgccccaattcacagtcctttggaagctcttaggtaattacccagaggatttaatggccctgttattgacctttcaccctccaaatttaatttctgggcttggccatgcattatttcccaccaggaagcctggaactccgtgacatcagagtgtcttgggagagggatgcagggattacatgctgctagaaatgatccttagctcaattccaggtggctctctcatataggggtcaggatatggaactggtggggatgctgtttgtgtggtgggggctgtgaggagaggatggctcctactggtgcctggcacatgagccgaatcagagaagggaggcctgggatgtggcatgggtcactgagggtccctcagtggaccctccacacacacgacactgtgtgttgtgtgcagcctctgctcagcctccttgggagatatggggtggggtctggggagtcaatgaggactgttgtcccccaccagtgacccaactaggcagagagtaaggcactagagcagtggaccttggaatcacctggagagtgtgggccaatgcaggtgctgaggtcctaccccagagtcagattctgtagttctcagagtctgcatttcagataaaccatccaggggattctgattcaggtggttggatgacctcactgtgagacagactggcctgggggtgcccattgctctctgaccgtcccctgcccgggctccccatgtgcagagccttgttctctgggctattagagaacaagtgaaggcagaggcagaggcagaggtgaagggaatgaagctcaagttttagggcttctcgacttgcaggatggtggggagagggtgggctatgaaagctgggaactgtagagtgtcctaggtgaagaggggaagccagtttacgaacaggaagcatttttatgtaaggatttctggtaaatggaatgaagaaatgtcaggagaaagggaccctgaatgtccaaggctcatgtaaattgttatcttcttgctggccgtaagtaaatatcactgttgtacctaattttgtatttggaattttgcgggttttttcttaagacggccccacagaactgggatcttccctgacccctgccctcagggagctcccaggatccacagacacccttggaacacagaaaaccgcaaaggcagagagacacacgttgcagatggcagagctgtgtggaactgcagggagtcttcaaatttatcttgggttatattcctggaaaaggcactgcaggtaaaaatgatgtaggttgaacctgtttttgcccagaaacaatgtgatcataaaaattacattcctcaccaatgtcccggtgcccaactttttataggcataagcacaaacaccacagacaccatatttaatcaaccataaatgatacacctctactctgttttttttttaagatggagtctcgctctgccacccatgctggagtacagtggcaagatcttggttcactacaacctccacctcccagtttcaagcgattttcctgcctcagcctctcgaatagctgggactacaggcgcgtgccaccacggccagctaatttttgcatttttagtagaaacggggtttcactatgtaggccaggctggtctcgaactcctgacctcaagtgatccacccgcctcagcctcccaaagtgctggaattacaggtatgagccaccacacccggccctgtatttctttttcttttcttttttttccctgagatggagtcttgctctgtcacccaggctggagtgcggtggcacgatctcggctcactgcaacctccgcctcccgggctcaagcagttcttttgcctcagcctcccaagtaactgggattacaggcacctgccaccacgtccaactaatttttgtatttttagtagagacggggtttcaccatgttgaccagcctggtctcgacctcgtgatctgcccacctcggcctcccaaagtgtactctgtatttcttaaattggatttgagtatctaaaacagttaaactgggcaataaccaaatcctcttctgtttaacatattcagaagattcctgaaggaaatgctttaggtagaagggaccatgggaaggactggagtgaccacccttcccccattcagaacctgtatgggcaaaaagggaggcctcagaggtctgaagctgggggacaagggttttgtgccccatggcacatctgaaaacagaccagccagccagcaccacttgcaagtatatctggcctactccgaagtgcatgacttttcagttaagggctgccacgcatacaccaagactgggggacacttgagagggctctaagagctgaagttggaatgccatttggagtgctgatttagaaagtctttctggaggaggaaaatcttgagaagatgcttgaaggcaggacaaaatagttaggcttcctgagaggtcagtcccagggactctcaagcatcttttgagttgacttttgacccacctcactgagacccatcataggctgtcaagaagactctgtccccaagtgcccatcacccacacctcccttctgctttattggttttcaaattgcaggtagagacccatcagtgggtcgcagcaagcacttttttaaaaaaatgaaaaaaggccgggtgtggtggctcactcctgttatcccagagctttgggaggccaaggcgggtagataacgaggtcaggagttggagaccagcctggccaacatggtgaaaccccatctctactaaaaatacaaaaatcagctgggtgtggtggcacccgtctgtaatcccagctactcaggaggctgaggcaggagaatcacttgaacccaggaggcagaggtggcagtaagtcgagatctcgccgctgcactccagcctgggcaacagagtgagactccacctcaaaaaaaaaaaaaatgaaaaagaatttttgttgaaatgaaaatgaaacaggacacatttcatgaatacttttttttcatgtaaacacgtgtgtgtgctgagtcatggtgttcaacgtatatctttccagatgtcactatcaagccttggttatttatttccagagcatgcaaataaaatacacatggggtatcccatatggtaagaataacatatttgcccaaatccagcctttttatttctgttgattgtcttcttttgtaatcagattctattcatttctgaacatttcacttcagaaatggttcacaggacagagaaactgcgacttcatgtatcctaatcctgttcttttctctttgtactgtctctgacctctatattttccttcttattttctgtcagagaaggaagtctttgtggtcttatttccaatatttgaattaattccaacatagatctcagagctcatggggatgtctaaagatctttcctaaggtctttcccagcagctactccatgggtctatttttttctgtctaaactagtgtttctgaaactgtgtgtgcagaagaaccacttggggaattgattaaaatacagactcctgggttttacccagtaagtctcaagtggggctcacgaactgcatttttgaccttctccccaagggattctgatgcaggtggtccgaagaccgtacttggaggaacactgtaaaccgtggagaaaattcagctcctcccagaaagctttcccccattcactcttgattctggtcacgccactccacttcccttctgcaggaatagtcttggtttatgccactttatgtttatttgcaatcatttgcattttgcctgaaaagttactttctctgggtatcctccctctctattaaatgataaattcccccaaagaactgtatcattcattgctatttccctagagtgcccactggagggccttgctcatggcagacttcccacagactctacctgcctgggaaggaagcctctcatctacccactgcccctaccagcccctacctgctgagtggggatccccatccaggagtgctcagggcagggggaatcagtgttatgtcctggatcaaacagcattgttgattgggtgctttgggtctgactttgtcctctcctctcacctccttaggaagaagtgaatcgtaaaaactattgagtccagatgaccccctggggactgtagcttcatcaagggctattatattctttcttgtgtccagaaacacatctaatagtagcaaagacagagggctgagctgtagggctaaaactcggtaaggcaagctagttccccggggcacaaaatttaaggaggcactcactttgaggcgctgaccctgtacttgcagaacctgagggttgagtgcctccttaacttttggcctaggcacctcccctgcctcaccctagtcccagccccactgggcggcctaaggcaagcatcctgaggcctggatccagacaatgaagagagagagagagaggagagagagagagagagagagagagagagggagagagagagagagggagagagagagagagagagagagagagaaagaaagaaagagggctgagggaggtgtggcctggagacagtcttgttgctagatgaagtggctcttcaggcagaggtcagcttggcccattctcctgtccataggagctggcctgtatgataagcaacttggtaaaactgaccctgagtccctgagtctgtgctgggagcggtccgtgttgcctcatccggtcctgatgaggctcacagtgcctattcccccagccaggaagaggccagaacaagcctcaggcccatgtcctctgatgctgagtccactggttttgtttctctttttgttttttcccttcattttccttccacaactcttctgcctttcatggaaaagagatcccatatcccaagagtcacttgtcaaagggattaaaatcttgactgtcagaaagctcatccttatattttattcttattgcttctcctgccaccaaccacattccttcctattttaccctcagggaacatgaagaagagcctgtcactggtcactggcctcagtatgtcagcacctggggaccttttggttcgtggtcttttctgtcttctttttttcagtcacattaatccatctcctttgcagaagattgttctttatttcccccccgccaaaagaagaaaaattaaaagagaagaggaagaaaaacagtaggagaaagaagagaaaaactcccatctccctgagctgagggagactgactgtctgaaggcaggagatgagggggtgacccccaaaatgctgggtagcctccatgcaggccatgaccctgggcagagtgggcaggagctccgccattgctgtgcctgcccgcataagtggctctcggaccaaatcccttcccgggccccagacccgaacctctcccttggcatgtcccaacgtgaagggaagatggtgaagtggccactggagagaggtctcttcccacctggcttatctggctcactcggatacctccgccatggaggagtgggattttcagaccccagacgagagaacagaaagctgaagactggggtcatgaacccttcccctctccttcccgcggccctgccatcagagatggtgtggcatccccatacattgagtcgggtggctggagtgaatgactaatgcatgtcattttcaagctgctctctctgaacaggaaagtacattcagatccaggttttaattgtgtgtgattttagctgagatggcgttaatttatttcctttgctacttcagcgcttcttcctctttcatcacggtgaaattatctggaatgtatcttttttttcttaaggacaaagagaagaagctgatcttgctccttttccactgattgaggtttagaacattttaggggctgccagatgctgtttagcgggtgcttcaggatggagaccctgtggtctcctgctgcctacttcctgctctcctactaccgcatttggcgaagggaatgcttcatgctgagggacccctactgcccaggccgaccccctgacaaatccaccaacacgggggagttttcagccaggtctggctccaggcagtttccaaagcaaggggagctttcttcctagcatgaccttcagagaatagcagaacaacctgacactcacaaaagacttcttggaggaaggagacagcatttcaaagagagatgagaagagaggcatctaaggccccctgactggtgttccgaaggttgcactttctgactttgcatgggagagggtctgtcaattgagaaagtgcatagggccaggtgattatgataaccccccaatacaatatttaaaatcattttttcttttcactcaaactttctttgtaataaacaaaaatactatacatacttttggggattctactgcattttgctccagaatttgtcctcagttgagagttggttcttttctatgtctctgcactagctaagaccattttatcaagcctgacttactctagtttttattataaaaattaaattaaaatactttttattttattttaatactaatttcaaatatagaattatagcatcatgttgaatatgctttttcaaactctacttaaatcccaaattggagattcagctccctcacccctccctactggagaattgctgaatggctgccttaatctctagcacaggaaatcaagaaagcattggccatcttgggctgagactattaaagcacccttttgtctcttgtccaagtagctctccctattctgtgaaatcagagtcttctttggttattctggcacatagtaggaaattcaacaaacaaatgttgcataaattttacccttttaaactattgtgctgtgcctggcacagggcaggcacctggcacctgacaaggtgcccagtattagccattgttcctaaggccttgacaccctgcctcatccacatgccctataacctgctctgtgttaagaagctctagctggtaggatggtaattttcctaaggtatcctaggacttcacaagaccgaagtcctcaacatcctgattggcacaacttatgattcacctctaaatgtgaccacctgtttagatactggcttctttggttttggtccgaggcctgtgcacatagtagggcctcagcaaatgtttattgagggaatgagggaatgagctggtgtcctccacttggcagcccctccagtcacgtgacacagagcctgagggaggctggggccggaccacaaaactccttagtgaacaactaagcctctttgattgcgctgtttgtgtacagggctctgatttaccagtacactattatggcttgagaatcattctgggcagcctatctttccagcatggttagaggtttattggaggccagtgtcactctgctgattaaaatttgtttctgagttctccgtaggttgctttgaatagctttggagttcagatagctcttccttccaattgcctttggtcatgtcccagctgtgtcagctgcagtctcagtctctctagggtgatcattatctgttcccttcccagccaggccccagccgagacttaatggacacctctgaccctgcaatggagaccccctgccatggttcccagatgttcctaactgtccatttacccccaactgccgtttcttaaaaacttaacatatacttacccatatgatccagcaatcaccttactaaacatttgcccaaagaaatgaacacatgtccacacaaaaacctgtacatgatggttcatagcagttttatttgtaatggccccaagttggaaacaacccaaatgtcattcaatggttgaatgattagacaaattgtggtacatcttgccactggatactattcaacaacaaaaaggaatgaactattgatacatgcaacaacttggatagatctcaagggcattgtgttgagtgaagaaaaggtaatttcaaaggtactgcatgactccattcataagacattctcaaaatgacaaaattacacagatggagaacagatgagtggtttccagggcttggggatgaaggatatggtatgactataaaaggagagcgtgagggatctttgtgaatggaacagttccgtgtcttgattatggcgtgattacatgaatcttcacacgtggtaaaattgcatggaactaaacacacacgcgcgcacgcgcgcgcgcgcacacacacatacgcaattgagttctttaaaaccggcaaaatctgaatgagatctgtagattgtattgtaactgtaacaggtccatggcccgatgtgtgtggcaagtcaatatgctgagacaccaggctgcagctgagaaagaaatttaatcttggggacaccgaatgaggagataggagaaaacctcaaatccatctccccaaggagtccagggctagggtttttaagggttttggagtgagccaaagtggggattgttgactggtcacagaatacagagaagtcatgggacggggagataaagaaattgtatttttgggatgagtctgttcctcggtgggggtcttcaaactgactgacaccagctgtttcactggaatttggtatctgaaaaacatcttgagcaattcttaaacaaaagctgagtgaatctaacatcagaaattccatctataggaacgacggggatgcaagtggtcagtatcccgtgttgcacgacttttggttacaatgaagtggatcaaagtgcagcctgattaaagtttaattataactctatttctgtccagaattcttgttaaccctgtgaggacagattcagttcaaatgtccctttgctgcttttgatattttaaccaatgaaatgaataaattatatttctcaatataatatgatatattttactgtagttatgtaagatattactggtggggaaaattgggtgaagggtacgtgggactgctctctactattttgcaacttcctatgaatctataatcgtttcaaaataaatgttttttaaaaaagaaacttcagcttttatattcccactgtttgtcagcccccagtctgcctttgatcttggcatgacgttcggggtggtttcagaagagccagattcttctggcattctcaaatattaagaatatagctaaaatgctttacttctcctaacctacaatgaatccattttccccaagtcatcataatctcatttgggagccctgtatatttctgactcctgcctcctcttggggtattgtattctaagtggattatctaccctgtgaagtagaactataaacttattttgcttatttgtttatcctaagcctaatcagcttcaccttcaagtttaaggaagatcctgaattcaattactataggacttgccttctgctgctgctttgtttttgggccaagtctgcgttccttgatcccgtgacgtgctcctggtgatgccaggcttggccctgcagttggcagggagtatataatcctccctgccctaggcgctgaaagagccgttccaaggcttgattcattcaatcaccctcatcccctccctacaacccaggaacaacctaggagctcagaactctcacttttctgcccaaatgtctggaagagaaagacataggctttttcctgttccatcacactttggccctgtgcattaccatctaggcccacccccaacttttttttttttttttttttttttgagatggagtctcgctctgtcgcccaggctggagtgcagtggcccgatcttggctcactgcaagctccacctcccgggttcacgccattgtcttgcctcagcctccagagtagctgggactacaggcgcctgccaccacgcccggctaattttttgtatttttagtagagacggggtttcatcgtgttagccaggacggtctcaatctcctgacctcatgatccaccctcctcagcctctcaaagtgctgggattacaggcttgagccaccacacccggccctcacccctatcttttgaatcctgatcttgtggggctccaggaaggtagacaatcagccaggagagcgtctcactctttttcttatctcctttcaaacagactaggcttacctggacagaccccacagtgatttagggcagaaaaggtctgcaaccaagcatgcaacttcatgctgtctctcttggagtacaagttccagaagtttatttccagtgggcagttctggtttgttaactgggagagtttggtgacaacaggatgtgggattctacctgagcttccctggcaaaaacttggaatccatgccccactctctacttcccatgggccaattcttcaggaggggttgaggggtaggagaagctcaagaaaaagacgtccttggccttctgggagccactttgtctttcgatgctctggcattttgaagcactgagtttatactctgaaggattacccctgcccgggggcaggaaggctgagctgctgagggtgtggacagttggtatgacactgaggagtattgtgggcacactggaaacatcccctgatgggttaaacacccagcacacacacacacacacacacacacacacacacacacactcacactcacactcacctgatgggcctgagcatgcttctctctgccatctagcctggcaagcggctaaggacacaaaggataaggcccatctgaccttgtttgagccctgaccctgccacttcctggccacgtgactttgggcaagtcttgtaaacactctttacttccatttctttatctttaaataggcgtaatgaatagcatgcatctacctgatagggttgtcatgagtattagaagagaatatatataaagtacctaatctggtccctggcatttagtgaggcctcagtaaatgcaagtgattttgacaatgctgatcatgatgatagtgagtatgaatgttttgaaatcattccgtatatgcgtccctcatgtttcagcttagacaccacttcctctaggaaaccctgccagactccacagggatagatcaagagcccttcctctgggtcccctaccaccctatattgtctaccctaacattttcacattgcactgttttgccaactagactgagttgagagctgcatccttgtttatctattcccaaggtttagaacaatgcctgacaaatagtaggtgctcaagagatatgtgttgaatgggtaaagagatgaatgagtgaatgaaaagatgatatgtaaatgtggtactcaagaacccctctcctggctgggcatggtggctcacacctgtaatcccagcactttgggaggttaaggcaggcggagactagcctgggcaatgtggtgaaaccccatctctacacaaaatacaaaaatcagccaggcatggtggtgcacacttgtggtcccagctacttgggaggctgaggttgaggatcgattgagcccgggaggtgaaggttgtattgagccaacatcataccactgcactccagcctgggcaacagagtgaaacgtctcaaaatcaaaaaccaaaaaaccctctcctggctggtcatagttgctcatggctgcaatcccagcactttgggaggctgaggcaggaggatcaattgaggccaggagttgagaccagcctgggcaacatagcgagactccatttctacaaaacaacaacaataaaaaagagaaaacatacctctttataccggcactaatcctgcctctggtccttggctcatgccgtttctatctgtgagaatgtctatctgtatctccccatttttctataatatttacgttcttcaaggcccatgtggagtccctgcttcctctctgaagccttccctgactacttcaactccctgtgaaccttgagggccaggattttacagtgatctgctacatagccccagagtgcttgtaaacctcagggactccatacatgtttataggttgagagtcagagcaggccagcagagccacagacaggaccgcagttgggacccacggtggtgcctctccccacctcttagctgggtaaccttaggcaagttccttgcattctctgattcattttcttcaactgtcctaaaaatgaaaagtgcctgcttcagaggcgtgatgtgagaaagtacatgtggagcctctgacacacagtcgtgtttgctattatcattacccttccttctgccacaaccgctcctgtaagctacctactgaattcattatgttgtgcggcactttccagcatcttaccctgatccttcttcttcttcttttttttttccaagatggagtttcactctgtcacccaggctagagtgtagtggcacgatctcagctcactgcaatctccgccttctgggttcaagaaattctcctgcctcagcctcccaagtagctgggactacaggcatgcaccaccacacccggctaatttttgtatttttagtagagactgggtttcaccatataggccaggatggttttgaactcctgaactcaggtaatcccccgcctcggtctcccaaagtgctgggattacaggcatgagccaccacgcccggccaccctgatccttattctaatcctgtaagcaaggcattgctcgccttgttttatataggaagaaactaagactcagacatgttgggtaacattctaaacgtcacacagctagcaaatggcagtgccaggagtcaaggccaggtccatggatgttacaatatgcatggataacaaatccatgcatgttacaatatgattctgggaagagtacaatggtccagctccttctctgcagtgttgttctctgatgttgcaagtcatttagtctttcccaatgttcttgtaatgagatggttcagataggtggtttttgatagcactcttgaccattgtgtcatgattttctactcaactgtgaactcctcaagggcagagactaaatatcagtcaaggttacttgcctagcatctatcattctccttacacggagtggacccatatgtggttgttgaatggatatttgactaacagaggctgtggtggatggatagaagagaggtgggggacttattgcatgcaaacaaattgacattgaggtgtaggacacaagtctagcaaggactggttttttccaggcactttagatttttagttattcccttatcccgcagggcagttgcactcacatctcaccctggtccaagcttaggaggtcttagagaggcaagttcctggctgtattagaccaatgttagacctggtgtatattagataagtgagctgcactcttcaccatttctctggttaagcatgaagggttgtaacgaagggagatgggtgacaccaagtacagttgccattggcagagggatgcccaggctgggacaagaggaaaaagaagaggggattctgtcatccatctgtgtctgggataaagaaggcagagaggagagttacttaggctggcagtgctaaggagagggatttctgaatggctctaggtgagcttgtggtttgggtggctgtagagagagagttgtcttgaccttgagctgtggcaggagctggttatctgtggtgggcaaataggattcagcaactgagtggccatgacccaccttgcttttcatgatttgaaatagctgtctcctgttctgtagccaggaaactcagtcttctatactctactcaaagtgttgcctcctccatgatgcattcctggaggccctgggagaggccaccactctgctccgtgttcctccatcatgattaatgggaggctgtgcttgacatttgtcgctgcagagaacttttggagctctcagcacctgaccaaacacatctatgttcaaggcccaccatggaagtggaatatagaagagtgactgttggaaatggccaacttctcctcaagagtccatggccgtgtcagcgggagtccctggggtcattcctagctcttccctgggtggttccctcacactccacactcagcaccctcatgcctgcctgctaccttcttcaggggcaatgctcttgcctaccttttctttccagaatcgctcagttcactccctgtgtatttattgatcactggcttactgtggactggcccacgagtgatgagaaaggggagaccaaagtgccctgaggtgtcatggtgtagaagacatgactcatacaccattccccacaagggaacagcaccgtgccatcaagtgctgatctggccatcaggtactgacagtgtggtggggaccatgggggctgtgggtgagcagggggagggctgggctgtcccctgaatgggatagagccccagagtgaccatcgctaccttccttctgccagacatcatcattggcccttctccccttggcaccagggagaagctggtgaggtagccgcatggactcaagagcagtttccaggtatgcctggctagaaggcagcaaggtttggacctgtgcccctttctctggagggatcctgggagcttcccaactggctgtcccatgcaattggctttggtttccccactagcttccttaaatatgtctcccaccctctcagggccccaagggaatcactttggaagatctgtcaccagaggacctcggctctccagccttggagacagaggacctgacacagcagacaggctgggagggccaaggtggaggggagacattgttcctctggctactttatttctttggtttgtggctgtttgacaacagcagtaaaaacagctgataaattaggtgcctggctgtaaactgcagcaccagccatggtgcagggagcagaagtgctccccgccctccagctccctgcacactcttcagacccatcagggcctcatcctctccagcacccccaggtctcagtcctgaggctcggacacagacaggggcaggggtaggagggcccgtgtctccctactcccaagtgctttctctgatcacagaaggaccggagagccgctgttggctcctcagaggctcttcaaacagagagatgtttatatcttttcagggcgatccaaattacaagcagggaactggagcctagggaaagtaaaccaagggataccagatagagattttttttaaaagcttggtttaaatcaacttccagaagacctcaaatgaggccagtggggcggaggaagtgccagaagaagaaggccggcaggtctggctctccagagtccagcgtgacccaatgcccagttcctttctgccccgggctcagtttccctctgtgtaccgtggcctcttctctcccagcttgttcaggaggccagttaatctaatggagaaggagccctgcagaactgaggatggagtcctggtgcagctttgaggagctgccagggcaggccagatcttctggcagccatcgactgcatcggtggccacaggaggaggctggcctgaggcctatatggaggcacttgttctaccccttggcagagacagtctgtctggtctcctgtcacttcacctttctgctccaggccccgcaggtgcctcggaccctgggtcagagcccatggggtctaaggcatccattcgatagtgctccatgccagactatgcaagaggccttgaggcataggtaccagctagagcttgcccttagagttcagttcctgaacacagaacacagctgctttgactcagcacccccggttctgtttctccactcatccgtccgccccctggcacggctgtataaagcttctacagctgggttattactctgcgtttgtttgtgtgttttctttgacggtgttaagtcattttgcatgtgcatcctgcccacatgaggacagcttggagagcaggaactgaaactgctccctcttatagatctgggattctgctctgggagcaggcctggtcacaaggatgccaataggcagggagaggacacccggagtgcacagggagagggcacccaggccgtgtgtgtgtgtgtgcatgcatgcaaataaattgacattgagggctaggacacaagtctagtgggggctggttttttccaggcattttaattttttacttattccctcatcctgcagggcagctgcactcacatatgaccctagtcgagacttaggaggtcttaggggggcaagttccaggctgtattagaccaatgttagacctgttgcatattagatgaatgagctgcaaagcaatgtaccatttctctttgatatagatgacatttctcacctactggaactatctaggtagcattttgtccaatctaaggagctgtgtgactttaggcaagtcacttaacctctctgagttcagaacttttatcttggaagttaggaaagggatccctgtgaaattgttatgaggatcaaatagataagaaacagctctgaaaagtcaaagtgttctagagtgactaagattctataacaaccattaagattagcagagatggactatggcaaacactagaaggaagctaagaactctataaggccttaaataggctgtactttctttcaccacttgtgctggcctgcccattcttctctagtgctttttctctgtgtagtgtgtgtatgtttcattttacacacacacacacacacacacgagttgtccagatccatctgtacctacatagattgccccaaacagagatatgtaaaatatacgcataactacaccttttcacactgataaaaacacccacaaacatgcacacatagataaacaaagactcccccaatcacatgcaagccagtgagggtaagtacgtacatacagtacacacacacatccccaacagcggatgattgatggctgatcaccacccaccccctgctgcctacggcacccagggacccgtatttttctacagtgtggtgtcctggagcatgagtgaaggctcctggggctacagccccattccttaccaccctcagcctgcacccggacccaggagacgttcaggtgactgaatgtcaatctgcatgcatttgaaggagtttcttgggtcaagagttccctttggggcactaggctgacatcctggggctccctttggctatagcttattcctactatagctgtccgcagtagagtggctccttggtgggtaactgctcccccaagggagggtcctgagcttcaggaaatgtgtttatggacctctaggaataggctccatctcaccgggtgggtttacaacataagaagtagctccatattagcagaataggagttaaaagattgtcctcatttctgagctttggtttcagttctgaaaattcttctaaacaaacctgttcagctccagatgttcagacccacctctgtcctcccagccccagctctggggccatcaagcacacaggcctggggcaggtgttccagccactctgcgactccccaggagcagggacccagccctcctcccaccatggtgatcagtacacaattcagttgtggagcaggggggtgatgagtcaactttggctttggacaaattacaaatggcagaatacctagagtttccatgaggcttcaccccaagatgaagcaaacttaggaaagttccactttcctcttgggtttggaatcaaaattggctgcagggtacacaagagggggctggggtgtgactgttgtctccttccctgacttcttgcctcctgctacctgacagaggcggtgttggctggggtgttggctgtgagtgcagggggtgcgtgggtgagtggtaatggctctcaggatctctgctctggttctactgtggcaggaaggaaaaggcctaacgccaaaacattcctccctgctgtccccagtgcagtatttttccacctactcctctggcttcagtatccatttaaatagagagaaggcaggtggggatagaggagagagaccaagggaactagagacagacagacagcggagaggggaagaggaagaggaaggaggacagggtgagcggggaaagaggcgaggcgagtagaaaagaaaacgagagcggaaagaagataagcagaggaagtgggggcaagaaaatgaaaagggagagagataagaagaggagggtgggggaagctcagctttgcgggtgcttggcagagactcctcctccagctaactgaggaatctgccttcctaaaatccatctggagcccagcacaccccaacctggggagaaggaagcaaggctgtgcctcgcctggtggcacggtcctggtggcgagctcctgggcttcatggggatgtgtgagcagggctgtgccaccctctgtgcccacctgatgggagatctctcccccgaccccagggccccaaccatgcctcatgcacaaaccacgtgtctaccattatattcctttctgtagcaaaagacttggcatgggaagcgttcctccgtctgctccaagggagaggcgacctctgaaaggaatcccctactcctgcccctggcagtgcccagccaggaaaggtgcagggtctctgggggtgagccccccacctggggctctctttgttcctttctgtcctggggctttggcttaggaaaagactcacacacagtggagtttatgggcacagttggatgtgtctgtgttgccatgacaacagtgagggctgcccctgttttcttctccattccatactctgctcctttcacaggctaaaacctctgtctctctcccccattcaagcactaaccaggcccaggcctgcttagcttcccagatcaaaggaagtcaggtgtgttccggggggtatggctctagtgtctctctctctctctccctctcccccgttcaattctcaattccttcctgtccccgctgcactattgctaatttccataggacttaaccccccctcccccatccctgtttctccctctggaaggagtaaagctatgcaggtttttcttctaagactgcaggttcccaagagctggtccccaccactgtgggtgggcaagcatcctatgctgtaactgggagcagaggggtaagggccttgggctaggtgtgtgggacgggtggggcctggggtttccagcatcctctgagaaattgcactcttcttcctcagggtattccttcagcaaaccccatccttgtccccaggcatctgcaagggcaagcctcttctacctcaaaacttgttgcactctttcttgcaattcctggtcaagattcttctcgcactgtgagctttgcctgtttaactccacctgacctcaaacaccaggactcctctcagcttttaagtgcactctggaatatcgatctgcgcttgcttctgtggtacgtgcccccgtctacattctgcgctgcgtttatgtgtccagcctcctcagcagcccagggcagtagttttgtcagtcaagcacaacttgctgtgctcccctccaaatcccctccccagtaccagacctctgtcccatggcaaacccattctgtgcagattggcagggccagccagcctggcctcctttcttccactcagccccacctgctcacagggatgggtacccggcccacgcaaagccagacagtgccttctctgagatttgatgctaggatataagctctttctctggccaggcgtggtggctcacacctgtaatcccagtactttgggaggccgatatgggtggatcacggggtcaggagatcgagaccatcctggctaacatggtgaaaccccgtctatactaaaaaatacaaaaaattagccaggcgtggtggcgggcgcctgtagtcccagctactcgggaggctgaggcacgagaatgacgtgaacccgggaggcggagcttgcagtgagccgagattgtgccactgcactccagcctgggtgacacagcaagactccatctcaaaaaaaaaaaaaaagctctgtctctggcctgtgagctgcaggacaatttaggcttggaatttcaggggccacatttctcactgcatgaaaagaaactaatacctggcaggaaacagtgtcatgactaatacttcatgtttacgcatcactctgggaatttgctgagggcaagggctgtgtcaacctctctcagactggaactctctaggggcgggaatggggtttacctcattagattgggagctcccctaggcaggagtgactctaaagcagattaggtgctaaagtcctggtagtgtaattggtaaaatatcatgcatttaaagctcctcactgaaggcttaattccttattcagatatctttataaaaatcccacctgatcataagctctacctgggtagtatctatctcatttgccattccaggtactgagtctaaaaagaaagacaaggccatctttgccttggggaatttgcaatcctggagcagaaggtatatgtgctatgatggaaatacatagagggtccagtgggagcatggggagaaatggaaacactatctcaggacaggtctggaaaatcttccgagaaaagatcccaagccaagtcctgaaagaggcacaggtgttcgtcatctgggcagagtggagagtggcattccagaccaagggaaccgcctcagcagaggtgtgaggtgcttgggaaggggaggtaggtgccagatgttgggggagggtgaggctgaatcacctccaggtgtttaggggcatcttcccattcactcctctcccagaccctcccttgaagcagtctttagtggaaccatcttctgctgtttggaatccacagtccttcagggcagactaaagatcctgggccatgcaatatgcttcaaatgacctccttccttagccttcatcttcgggctaccatgagtcagaattctccgctgcaagtcccactaaccaactctctctgttagaagcacaaataaaatatgaaatttacagaaatataaatggagcgatgtatttcatcagctgaggatacaaagaaggtcacagatctttgaatacttaaatcagtcctttaagcaagcacatttccaactaagcagaaagtctagtatctcttagtaccctctcttcctccccagcgcttgcccctgacaatggatggaaaagccctagggcttgtgtagtgtgatgggccagtaaaaagatcactgcagagccggcccagtccctgcttctatcactgcctcctgaatgatggctctgcattggtctcacacaatccagaggggcttccccatggcggcctttatgcctttgccaatcagacgcctgcgcagacctgctcatggctatgccacttctggggtttctgatacagtgcaaatgagcttttactcacctgttttgctactgtccccacaggtcaccagctaagtagctgggtctgggagagtttctagccactgccacactagccacact

SEQ ID NO: 362 - DNA, 583276 bp, Homo sapiens
  source 1..583276: mol_type = genomic DNA
attgggaatacttgaactgcttcagaatttgtatatatatttaagacaaggtctcgccctgtcacccaggctgaagtgcagtggtacattcctgtagcttccatctcccagcctcaagtgatcctcccacctttcagcctctctcaagtagcagggactacaggcctgcaccaccactcctggctaatttttgtattttttatagagatagggcttggccatgttgcccaggctagtctggaacttctgggctcaagtgatcctcctggctcagctccccacagtgctgggattacaggcatgagccaccacacccagcctggtacattctttaaaacaatgaaaaatgccctgcatattccagatttctcttttctcaaatatgccattcttatgtcgtaaatactaaattcttatttgccttagttaatggatttatagcttaaatatattttctgaatacttcctgtgcgtactttctgtaaaaaaaattaataaacataccctatatttttaattcttattctacccacatttagaaaggatgcagggagattctctatgtatctgatattgtggctaagaatgaataaacaaatgaaaaaatcggtctgaatctatttctacatgtcatactaatttattcaggccttgttaaatctctacgatcagccaaaattagaataagtctactctaaaacaacttggcattatgcttaaagagcaaaaaaaataaataactgctcccccagcagagaatttatcttatggaagtactactactcacattccaactctgtatgtacatatatgaacacacagaaacaattatatgcttgaaaattaaaatataattgctgactagcaaatagcagaaaaatcttcaacaaaattaaagtggtggaggaaattatagtagatcaaatgatggaatattgggaaactgctacattattattttgaagaatttgtagcactatgcagtgtaatttttttttcttttgacacaagcaaagaaagaaaaaataaatcttgtttacacgcagttataacaatgaaaaaaggatattttgcatgtggacaaaaaattaaaaggagcatagaaaagtcaaaggtttcccccctttgtgaatcagttaacactactcgtataatgaaaaacaaaaataagaaactgagttccttttggcatacaatccgtagaaaacctgtaagtcgctctttgtcctaatttaagtggatgctgtgaacgtgaagtgataccaggactgggttgtggtgcacttgagccctgactgcaccacatggggaaagtacagaacaataagcgagactcattgttgcccaagaactatcatttatgctatctcaaaacaaaacaaacatactctacattccacatatctgtagggcatcaagatctcagcatcatatctttaaatcattggatcccaaagggaaagtaaaattgcatgaaggaaaaataccacacagtggggaaaaatactcctttttgtaagtctttattttttagttgctcctcccatagtaatgcactgaaaggcataacagtttatattgtacaaagcatttgaagaaagtacctcaacttgctgattatttcaaaatgagattacaaacaaaaagaaaacaaatctggttcctcaataaagggcaaaataactgaatacagtctgttatttacttctctcttttaacataaggttgggaacacttcattttacaaataggattaacatgaacataacatcgcacaagcttgcagacaaccagcataaaatatggagtacagtttttaatcagaagaatcatgcttccatgaaagaaattataatcgtttatacaattgaatcgatttcagtattacaaaaactaagttgcatctattcgtatttagttcattaagaaggaaaacaaaacaaacaaacaaaaaggaatgttaagaaaagccaaacaccatttggcactctcatacacaggtcgggtcaccttggtccttgaaattcggaaaggggtgtgcctcagacgtcataaagtagtggctgactggaacagtgctattttaatcaacaaacaatagtttgccaacaaataaatacatgatacacgcaacacacacaaaaaaataaacattaaaaacagtgacatgattgtctaaaattaagatgttattacaaggatttggcaaacaatttattagtggtacagcggtactggtgatgaataggttacttcactgacttaacctctttgagtgttaacatccatagtttacaatatacacataccctttttccctagttttaaacaatgtacttaagaaggcaaaagggggaacaagtactccctgttatcagtttctataataattgactgtgcatttcatccaactacttctgtcttcaaagggttaaattacataaaactttaacgaagaaaaaaattaaatctgtaattaaaagcaactgttcccaatcatgtcaggtgatcttgtacaaaagagaattcagtttctatggagtgttcattcatatcaatgctgccatctcaactgcccttctcacccacccataccctaaggtggggtaaactggaagatgccttcagcccaccaagttttttgttttcactgaatcactttaagtcgcattgattgatcttccagaagtcagcagctgcctttgctgtgcaaaacaaaatatcgagaataaatagtttcttttttctttcttttcttttttaaatcattcagtttaaggtcactagactttagatgagtgaccctgcaggtttataaggcattctgctcagcagtcttgtaaatagtcctatatgaaagagccatgctactgttggacttggtcccactctggtcaaccttgataacgtcatacgtggcttatggactggatagcactggattccgccgcagccctggccatactgtgccacacgttggaagaactgtgggatgtagaatggagggactccttgtcagacagtgacagcatcatagcatatgcctggggtaaaaaggagagagactcagtaaatggcatttgaaaaacatcacttttagttcaaagaatattgttggtaaatggaaagggatgggaccctgagtaggggcatccttcatgggtgtgtttggcaaagaaggcatattttttgtagaaaccacatgggattactgctggcctttagtgcctaggggccccaaaagtgacacacgctacagaaccaaaaagaactatcctacctaaaatgcaaatagtgcttccattgagaaaaatgagtcagtctcctgttcaactataaatacagtcatccatccactacatatgttcaattcaccaaaaatattattgtgtgcttatgactgaaacctcaaatattaataagatatagacctaccttgacagagctgtggcctagtagaggatacagcctgactcctacactttataaccgaaagcactgaaggtgcttgagtgacttgcccaaagtcactcaattagatagatagtgggagaagcataactaaaatgtatttctgcccaacttttaatccattgtcttttctccaatttccctccatgcttgacatactcagtcctggcacccataagttgaggtggatcaaatcagctctaccaaaaaaataaaaccaaacacaagacccaacagtgttctaatcaacttgttttccagtgtctgctgagcagaaggtgcatggaggtgctctgtgaggaagtactctttcttccctattatcatgtcaaattttaaataactgttcagagagtcccctatttactgccaagcaaaatattcaaatgaaatgtttggtcttgacttgtaagtgaacttttcactgttgatttgctattgttggtctcatccattgctaaacttgcttgtcaaaatgctgctgaagtggaatcattaaagtcctgccaaagacattccactgtctgtaaacaaagacaaaatgcctctgttgttaggcagaatttcatctctgggagtcatgctgagacatgtggccagtctgtggtttcttccgtaatcattgcatttagttagaaaatttacccttgtaggctgatttttgatttgctgggtcatcgctctaaatgtacacatttgacttttatgtatgcaatttgccttttggacttctacaatatctcatgatccatttaacaaatatttcttaagcatctactctatgccaggctctgtgatagatcctaagaaattaagaataaataatatagagtacttatctttggcagagtttaaagtatgggttaagtgagcattcaacctaaattatctattctgattatgtacctacttttagagaacaagataaagagtactctgaaagagttaaaacaaattctgatatttgggaagataaaaaggagtacaaagaaaattttggaatttaaattttaatcctgcctttaaacctgcctctactcacctagctgtgtgatcttgagcaagttgcttaaccttttaagctttactttcctcctataaaacagatgatagtaataacagtattggcctccaagagttgtggaggaatcacatgcactaacttacataaagtgtttagctcagtgtgcctgactgaggtaatacataaatagtacctattaccatgaaattaatttttaccggatagagtttcttgagggagagcacatgcaaaatgcagctactattgtactggtcaactattttcaattcaatcactataaaaattacagactataaaaattacagaataaatatatgaatgctttgactaaagcatctgagcctttagattctagaaaatggcaaaacagcatatctgccttttggtaatcaaaggaaataaacattttcatatataaggatcagtgcccagcatatagctggtagttaataaatgaacgaatgaatgatattatgaaataaagtgaatttgcaaaagggcctgaccattttcaaactaatctatataacatgatcaagtaacaagaaaaatatgacttaggattgcaaaatgctagtgtttcttataacagtaacagtccagctgggttgggactttatgtcaaaatgctggtactaaaatgtattataattatatcccttatctgtaggttttcaggcccttttgctttctgtcacttctggcagtttctggagtgtttaggtattatatcttacaataaataagaagcatttttggtggactaattaaaagaaatttaaaaagaaaaaaccatggccaggtgcaatgggtcacacctatacaaatcccagtaatttgggaggctgaggtgggaggattgcttgagctcaggaatttgagaccagcctgggcaacatagtgaaaccccatctctacacaaaattgaaaaattagcctggcatagtggtgagtgtcaatagtcccggttatccagatgcctgaggtgggaggatcacttgagcccagcaagtcgaggctatagtgagccgtgattgcaccactgcactccagtcttagcagctgagtgagaccctgtctcaaaaacaaagaaacaagtaacaaaaaaccaaaaaccttgatactcaagttatctctaatcaacaaggatggaagaatgggaaatcaagggttaaaaaaaaatactagccaccccttatggatgtctctaagtaaaaatgaaatgtctactctagctagtttacctttaatgttaaaaactggaaacttcatttttatccccattgaataaaaatccacttaccccttttacaatgaagaaatggtacctatagtctttaagtgatgttcttaagttcatggaggtaggctctaggagcctctgtagatggtggctgctttaacttcagttgagaaagaacatttattttacctattaccatacataatatctcagaactttttactaaattgaatattatttaatgatttgtattatcccattgacacaatgtttttcccaacttccttgggatattattacatttgctgttaagacaaacccagacatcttacccaaatagaaaatcatttccaaatgtacaaactaatatggtcacattgcaggtcaggccacatacaaaatgaactaatggatcaggcaattagaccacagtgcccaataaatatggtaataggaagtttctttatttttaattgacctgaatgaacaatccggttgagtgtggatgtcaaacaaaaaagtaccgacttcctttattttgtaacaaaaacactgaggctcttttaattgctatttatggacccttaaatagatttatttttagttaccatagtgctgatacaatgttgtagagcctaataaatttgagtaccattcattcactcattcatttgttgaatttaaattgacaggttttatttccaaatctgccagtaagttggtgtagacctttggcaactcacttcctttctgatcctcattttactattaaattacaacatgagatgacttgctaattaactacacctaacaatttactagacatagaaggggacaaaaaatagaattcacttttcagaaaaatcttaaaatataattacattgacaaaagtatagacacggaaaatgactctgaggtaatacataaatatttgtaaacaaacatgatgaactaactgtacaaaagtaagagaattgcaaagtcaaggaaagataagtgtaggatggggcttgtcataaaatttctatacagaatgcagctaaattaattgctttcttgcttaactattttggatttggtcataaatacagtaaagatatgaacatttttagaaaggcatctgaccccatttggattctaaaatatttcaaagatagaatatttgctttttggtaatcaaaggaaatgtacgtttcatgcataatgtaaccatgatgctgtactatgggaaaatctgtacctgcgatttggactttctgtgtaacggctgcttaagttcctctggcacatgggaagtactaaaagaagacagctcagcttcagaatattgattatcttccattttcctcattttgaggctatctgtgaagtgccttatatgatctagagcagaaagtccacttttatattcttcctctttatacctaaaatgaaccaacgaaaaacacagaaattttcttttcatttgttatctaatcaaatcactttcatttgaatctatctatacaactgacaaacttcatattgtatctgcaaggtaaagtagcatgcatcaattattgggtttttataaatacttacaaacatcatgtcttaaaaatatatttctgttaagatttttagtaactaaagccaagcatatatttgagataaagagttaaagtcagtgacacattagtcagtaataggcagagacagaattcatatattcattatttccatttaaagtaaagctaattatgacaatatttagtcaacatccatcatgaaaatataatagtcccatcaatttaactgtttggttatttcttttcatttaaaaagttatcatctatatagatcacatatatatctactgaagtgaagtttatctcaattatacttaactgatgaccatgccagattattgtataattagataacgtcaaaatctctatttttctttgagttttataggtagagtctaacaataaatgattgtgtacttatgtaattttcattttatctttcccacctcaggttaatcagagttgcaccaaacctgatgtatttatatgcttgtggattatgttgatagccaccttattttcatctatttaaatctgatccaccatgtatcccttactaattcaagtttaatttttgtgatttataactcacaaattgcttatcacaggaggaattgcaaccgtacatggatctactctagcttagtttctaaagtcacccaaggtactcacctcactggggatgtcttgcaactcatctccagggcactggtttcttcatagtcatcctcagggtttccttcatgtaaattacttgtcactggttcctttcctgtttttccagtaatatcattgtcttcatcctcctcatctaacaacacctcatcttcaacttcttcatcatccagcaagtctgaattttgactggtcaccaaagccttttcatctttaaaatgactgccattcattctttcaaaagcattaaaaaaaaagtccaattgttggtttcatttttaaaattgtaatttgttcctttattatgtcttcccaacaacagtttagattttcaacacttaacatcggaaatgttttattgtttatgctctacgtcaaccatgaaaaaataatgtgacttcacaaatgggaagataaagaaaaaaataattgtatgattgttcagattataaatgaagcctctggcagaacccgaaaaacaatcttggtctcccatttcttatcagactttgcttgataattgatattgctatatatatcatataaaaaggcacataagtatgttctcagcacaatttacctaattgccatgtaagtacccaccatttaaaataatagatttctggaaaattcatatcactcatgggccgtagctacaatacacatgcctaaagtgactctaaaagtccaaagacaatgttaaagtagttaccaagaaacaactggtatttactgatactagatgacatttgtggtacattccacctaaccactctacccatatttggaagtaattgacagctcacttatttgtactattttcaaattattttttacagtctgaatgtgaaatagttccttgtttctcaggaaaacgccagggtggaaaaagctcaggtattacaatgtacccccatcactttcccacataacaaaaatgagtataatttaatattcagatttcccaggattaaaaaataaataaaacaatcttggatgtgacaaacacacatagtaaaaatccatttgaccagaaaaagtcatatcattattaagcttttaataaaaacaatcgcttaacctcttttatcaaagaatggtgaaaacatcttttgcacagacataaattagtttccaaacacactgccaacttgcttgcatgagtggattaaaatttttatttaaaaaaaagaaagaaaaagtaaaagaacaaaaagagtgcatggatgaaaatcaaaagtaacaaaagccaacataattaagaaaatctatttgttaattaagttttcaaatgtggcaatttacagagaataaattattcatcaaaagtagcctggtaggagttcaggggaaaaacttagatgactcaaccttcttatttctgtgctgtttagacatgctgaagccagatgttgcaactatacaggctcacaaatcgccaattaaaggctagaaaatttgaataggcatctcagaacccaaatggtgtgttttgttcaacagttcttatttgcatcaagtaaatatcattatcaaagtataagatcgtcactgtttcttgcttgttcttgctactttgtccttctgatcatctgcttcctctctccctttcacaaacagacagacagacacgcacacacacacacaaatgggcaagtaaagggaaaggtacatccaactgcacactggtgtagttatcagacttctcagagactggaagggtcttttttcttgtttttctttgatacacttttatacaagttgaaaaacagaagtggtcattttttttgttattttagtaaaaaatgtttatttgatgtttgccttgaaaaaattacataaaataattaattttgacttttgataacatcaaaaacagaggacactaatccaataatacttgtatgatgaaaaataatggaacttttaactaatttcatgttattttgaaatttacaatgtagcatctgaatttaataggtcactatatagtcgtgttcagaaaagtctacttctcaacaatagatatttaattatagcttacagataagaaaaattaaatccagtagttttggtgaaatagtgtttcattaacttcatatgcaatgtgaagtgctgggtaactgttaagtattatcattaacagcattaaaagcttttttaaatgaattaagctattcatgcttaatgttggtgatgataaaagggagccagtgcatcagggcagtaaaaacaaggatgttcatacccactgaaacaaacagaccagaattaaatgagtagtcacttaagaggacataaagtagcaatagaatcttaagaagactataaaagcttctatgtaaaatatatttgggggaaactccatgggtatttcatatataaatgcatacatacatatgtactataatatgtatattacatatatacagaatatacatatatgtatttatgtataatacaggtatatagaatcatatattacctgtaatatatataatttatgatgtataatagtagccactattgatcagtgattcaactgaatccctgtgacggctttctcttctacttctgaaattttgataacagattctattcagctatcagatagctaaatcctggtaaaattatgggctctggaaccagagagctcaggttgaatcccattgattacttatgtgacctctgacacaatggtttaagcttcaatgtctccattccttcactgctaaaattatagtggctatctcatagggttatgatgaaattaaattaattaacacatgtaaaatgcttggaagcatttaatgtggtatttaatatgtactaaatatataccagtctttggtgactgaagtaatagtagtgccacaaaagtgagcatagcaagtatattttaaaacatgttcatttcagtcgtcacagagtttaaaaagtaaaagacagctttacctctcctccacattcctgggagattggctgccatggttgctgttcccaatgaaatttcgaatttctgtgaagtaagcatcttctttgtcatccagaatcgcacctgtactttccagttcagaatgaggcgacgatgttgctgtacctgtgtggagcagaaagccttttatgacaaagattattgtttatctagcaacttatttggaaactcactccttatgaatttgatcagtgctgtttcttaaaacatgccctatgaatattaataataataactttagaaagtcaaagtctccccagtttaccataatacacatgcccatgacggtcctttgggaatatattgaaccactgaaatcatgaagtacagtctcgcaaagaaggtgcttctctcactagcttttccttacctctattgtgacatgagaatatttgtattcacataatgagaatttagagtgagacaaattatgaacaagttttaaatagattctgccaagagacactctatatgaagtcctggttgcagtcaacatgcctttttatttatttatttattttttggctactatgctaaagcatataacaaaatacagtttaaaggcacactgaaaattctgcatcctggtttgctgggcgaagctgtgagttgactcagaacactccagtccaggggttggtgcagtattaaaaggacaatattagatatgctgattacaggatgatcttccccttccttgcctatgcactgcaagactcacaatacccgtatcactggattggtgtaaggcttacataaacttaaaccacttttacacttaagcactttatatgtggttgagctttacaccaacattagcttcctgttgtttatcttgcctacaaagtatctgtaatataatagttcatcacaatagtctatatgacaaaaacaggaggttagaacatcccctcacctaaaagaggttacaatcttggtcaaaaagtattaactttgacatgttacatgtttaaccttttttcttaaaataactttgataagaaaattatagttgtatgctataagggtacacacagttagagtggccagttttgcacattggattatacttctctacctaaaatctaatattttaaaactatgatcattaaattgctgactttgagggagacgaacagtatatacttttaagtactaatcagacaagatcataaataatgtgcctttataggggaagaaagattaataattaaaaaattccataaataaagattgctagtctgtattaatccaaattttttctgttcttaaatctctttgcctgaattctgtatctctcctcccctacccccaaagcataacctttattctctggagacaaattgtgactgcacaggttggctctgcacacatatgccagctggcaaatgttacttaatgacttattatctaactattggaagccaaagactagaaaacctacaatcccttctgctaaatatgtgctggcaaggtcccagttaagaaaagtctagttttatgccagttacttttatcttactttcatataagaatttgtgacaaaaacaaagcactactatcatttgctatgggttgctctgatcatgtcaatagtctcatattcccagtcttaacaaaaattaccaagagaggttctctgagctgcaggccttttacaaaagcagctatgctttctagattaatattcagagggtgacattctggggctgctactctagagactctgccatgcctagaggccacattctgtgccaacaggtgaaaagactgtcccctgtattttaggaaatcttgtttcataagtctcctgcgagtttaggtcattgtcctctttgcttaaaattacccattaggaagataaaaacataatccaaataaggccactgaattataaattaatgatcacattgctcacattattctaaaatctcaacagaaacttcctgggaatttttacaataagacctgattttggcgtcaaaatggaataaaagaagaaagatcacattatcttattatcttttaaaacacgaaaaagaagtcatctttgacttataacacaatttattacgtaccggacatgttcccattctcatgtttctttaggtgtctgtctaaattggtttgttgaccaaaacacctatcacataagtgacacttaaatggcttctctttattgtggatgttgcgaacatgcctttgcaagttagaagatatgctaaatgatctgtcacagtatttgcatctgaaaaataaacaaagagaaaatattagcaagcacattaaaaggtatttctcaagactagttagccagctatcaaaaatcatctccactcataaaacaacattttaaagaaaaggcacagggagaatactattcacacaattaagatttcaattccaatatactctgattgctttaaagactttcatgactttatcagaaaccataataaaatattagtgatttgattgctcccaaattcattaatcagtaccaatattttaagtaaacctcataaaataaagcacattgaggaacagtagcattgttttatcttctgcttaggacaatacaactaatttttttgtaaacaaacaaaaaacattcatatagttttcaaatacaataaaatatcactttttaattcaaaatttcagtctgattaatttctcaggaaattcattttctcaggtgctaatcctaaagaaaattccattatcagtttcaaaatagcaatcaatattttagacttttaaaactaaaacaatgtaaataatttagtctgatacccaagaatcagctaccacaaagccttttctctgttaatctttaaactgttataaaaaaaataataatgccactaagttctctttttggaatgaaagcaaagggcttccatttatctcccttcctattaccccctatttttcatttctctttttctgaacgagtctctagcagtctgaatcaggttggtttttcatgaaagcacttattattggttggttagttgtttctgtcttccatgtgataaaaaaaatcataaattatttttaaagttttcctttagtcataaaatgaaaatacaaaaatgcaaggcctccttcccctagctctcattaatgaagaagaaaagggtttttagtaattgagaaggtattgtcctctgtcattttaaggtaaagattccattatttgccatcatttgtttatgattttggggggcatgttacttgaaaaaaaaagttaactttctccaaatgaccttttttttttttgttttttagatggagtctcactctgtcacccaggctggagtgcagtggcacaatctcggctcgctgcaacctctgcctcctgggttcaagcgattctcctgcctcagcctcccgagtagctggggttacaggcacgtgtcaccatgctcggctaatttttgtatttttgtagagacagagtttcaccatgttggccaagctggtctcgaactcctgacctcaagtgatccacacacctcagcctcccaaagtgccgggattacagttgtgagccaccgcgtccagcctccaaatgacttataaatgaaaacttcaatcttagaggacagaaaattcttaactcatccttccatgtgtgaagggcccttctcctcccacttctgaatgcagagtcagtggttcaagtgctctaaagcagaagtcaccccattccactagagttcttgggcttctgtggttgtccttatgtgatgccagaagtctagtcagttcagtaggaaaaataatctgttgaactagttactttggcatagtatcactaaaccaacacaagtactgatttgatttttcccccttaaaaaactgttctggcataataagcttcttcaactttcctcacttacgatattaataaaaattgtgtgaaaccccacattatggtagttgtaatattttagccccagttttttttttttttaaatgcgtataaagttatgaccttctctgcaataactctgtttacctccaaggcccactgcaatgagaaccatgctatatttagcacaatttattctgtgcttagcagaataacctagaaaaccctgttacagtaaacgtactcccacaaaacactttagaaaaaatttttcacccaaaacactttctacacaaatcatgaggaagagagattatgtttctgccatgcttctaactttctgcttgcacacaaagggtcttttccaaatctagtaagcaccatcttctcaaatctaaataagcatgttctaaccaatgatcagttgttactttctatctctcctctgctaaagtcttggccagaaaaagaatgttctaaataaaaaaatcacttccttctacacaattccaataagagcctaagttttagaaattcttaaaacgaacacataacacagtcatgggcagtatactattaagccttcctagttattggatgtagacatggaggtcagacgagcctttgagatcatgatgtaaaataaaaacgctgaagtgagagctctgggcctgggttttaatcctgactctattagtagcagactttgcggaaggcaattagcatatgtaaatctgaattttttcatttgtaaaacagaggggctgatgcatcaaggacacagagatgagtaagatatggattctccgggacatggtggcacctgcctatactataatcccttctcctgctaagaatcaggaggctgacgtgggagaactgcttgaagccaggagttcaaaaccagcctgagcaacagagtgagacctactgtctatataaaaaaaaaaaaaaaaaaaaaaaggtggattccactgtcaaggagcttgtggtctactggtatttatctttctgaagagataattttctacatagggaccatgtttaacttttactacataaagtattaaaacctaatagaactttccagaaggcacaggtcagccacaggaagcagacaattcatgtatcatttacataccattttactttttttaattttttctttttgaaataattttagacttacagaagacttgcaaagatagtacaaagggttcccatatacccttcacctcagttcctccaatgttaacatcttacctaacattcattaaaactaggaaattaacattgatgcaatactattaactaaaatacagactttattttaatatcaccaattttctccagtgctctttttctgttccaggatctgatctatgatcccacattgcatttagctgtcatgtctccttagttttctacagtctctaacagttcctcagtctttccttgcctttaattaccctgacacttctgaataataccgattgggaatttggtagaattttccttaatttgggttggtctgatattttctcattattagagtgaggttataaattttgggggaaaatagcacagaggcaatatgccctctcagtgcatcctatcaagggtacatgatgctgacatgtctaacttctggcattgttaaccctgatcatttggataaggtagtatctgccaggtttgtccattataaggttattactttttctctttctaattaacaaatattttgcagaagatattttggggctgtgcaaatatcctctttaaactttcactcactaattttttattttttaaataaacttttctttttttgaagatggggtctcgctgtgttgtccaggctggtcttcaactcctaggtttgggtggtcctcctgccccagcctgtctgagtgctgggattgtaggcatgagccaccacacttggcctaaataaacttatcattttagaagagttctagatttattaaaaggttgcaaagatagtacatagtacccattttcccctattgttaatatgtttcaggtacgtttgtcacaactattaaaccaacactgatacattaactaaactataaaatctatctagttcactatatccactcattttaacattcaattgatcttccctgtagcagttattattgtggtgtcctacttgtgattttgttttcctcattttttctacactgttcattggaattcttctgcaaggaaaaaaaaaaaaaaaaacccagaggggctggacaaataattgtgtaagctctccagctataccaaaatgctggtttgtggtttaaaaaaatatatatgcacaataatagagccattattgggtggaataaaaccattgaaatttatgtacaaagaaagagtaaaatgaacgtgataacatagtttccagtactcttgccataacaaaacatgagtgtggaaacctttccttccacttaagcagaatttctggtaatataattttctcaaaaggggaaatcatctaaaacttcccagtattacatctctctgagacctgttatatcaagtgcattctatcatgtataaattggaaatatatcacttataattagtgatttataaaacaggtaggaaagcaaggaatttgagaaaactgatgttttaagtttagctccctctagctttcttctaagatttcaattatcctcaaatgacccattttcttattttaccattaaaaaaatatttgaaatctgataaataacttactttttgttttaatagaaaaacttagcactcaggaaaaaataattttgcatacatgcaatgtataagaatttcaaaggagaatgacattatgatattacttaagttgtataatattcattctttgaagaaatatttacgagtaactaatactgtgtgcaaggcattgaacattaaataatgtagtttatattttaaaattggaaagagtaatgttgtctattttcaatctaatctttctaaacaatattaaaattagatgtgtccaatgtgtcatatgactaattttggcatgtaatagaataaactaagaggtaatttaggaaattattgataaaattgcccgtttttctataatatactctattttatctgtcctacctctagtttcatattttcttctcccctgacttcccaggtttaagatctattctttttttctttctttctttctttctttctttttttttttttttttgacagagtctcactctgtcacccaggctggagtgcagtggtgcaatcttggctcactgcaacctccacctcccaggtgcagtggattctcctgcctcagtctcacaagtagctgggactacaggtgtgagccaccacacctggctaatttttgtatttttggtagacacagggtttcaccatgttagccaggctgatctcaaactcctgacctcaagggatccacctgcctctgcctcccaaagtgtcgggattacaagcgtcagccaccatgcccagcctaaaatctatcctttaaacctcctattggaatccatggaaaatgacttagctgtgctgggggaaaaaaagtacatatgggttattaactcctagcagagatttgaggcttggaaaaggaaggctgcaaagttatgatttttgtcaattaagatcatcctaattattgagaaaagagaacaaatgataataaaaaataatatttaaaatggctagcatttcttaagtacttattctgtcctagacactgtgctagaacttttaaactgagaggtaggaagccttgattaaagaaactggaactcttctaattttgatcctagccattagtcaattctttcttgactcaaaattgaatagacatatattcagacacgcataaaatttaaactttaattattataaactttaattattattttattattaaaataaactttaattattacaatatttatcaagatatttagcaaatatcattgtcagacctgtaaggctgctctcctgtgtgggttctcaagtgccgtgttaggtttgcagaccttggaaaaatcttgccacagtatctgttatgaaaagatgtttataagagaaagtcagcacagttgactatatttcactcatgccacacagcagccagatgcttattcctgattcaattaatcttgcatggaactcacatttctttggtatttaaaatttacaacaaagccatttcacagatattaatataaataactctacaaataaagactgcattctaagatctggttgaatttgttcacttataagcaagcaatttatgaaaatagactttagttttgattactcctatacatctctcttattaactcaatatttttacattcacaaaattgaaccagataaggggataaaaatatgataagagtttctgattctgggttgatgtaaacagatttcaaatgtttcaactcattttacatgtcagccacagtgataactccctatgcatagagtggtatcagatcagacaaaatcctgagacttcatccatcaaggtatgtacccataaaagctttatttctggaaagaaagtgacatatttttcaaagagaagataaagtgatatgcctgagtcaaatacctacacatttctaaagatgattcagaaattataagcacaatttatttagcaaaaaaaaatcacacacaaaaccagaaacataaaataagctttactactgatgagtaacaaaaaatttactagctagttttattcacttatggaccttacttctctttaattaatggccttattctttaatgccatgacaattaataaatatatgcttgaggacagtagtagtatacctttagatgaaaataattaattgtgaaagaaaattcataaatatcaaagtgagacaagtagatagtatttggattgtttccaacctcatttatcacaaccaaatgtcctgtgttaaaattcacatttaataattttttaaaaacactatttttatatttcactaaatgaagaacactttgaagtgctggagatctattatggtggctattaatcatctaatcaggaataatttccaaaacaaacagcaagaccttttgaaatcagaggggagatttctggaaagtcagccataattaactgtgcagttacctgcaggtatagcgctcctttcccttccgcagaaggttctctggcagggcattgggaggcgccctgaagttgaacatagagggcactgactgtaagagctcactggcctcaggtttcagggcactgaagctctctagcttttctgccatgttttcaatagctgacatctgaaaggtaaaagcacaagaccatgaagcgtttggcatcttgtcttctataataatctctggcaaaccaaggacatcattaaaagggaagcatgaaatctgcgacgggttgtagaaagagactgtagtatcccaatattaaataaacaacaacagaattgatttatttgggaaataccataagtagaaccaagcttataaaatgctgagcgaactttttccataagaccttggttaggccattttatcataatctgatatataattgaacattgaaatacataagagagccaataaagccaagttaactttttatttgattaaatgacagcattagtatcatggtatggatattaacataacggaaattataggaaaagttgctatatgccttacctaggcaatgaaaaccgtaagaaccatgcagtcccaagaaaagaactgaaagcatgggagaacatgaagtattacagaattacagcttaagccaaatatgggtaactcagaaagaaaaaactaaatgtataggagggtattgcctaagactacattaaattaacatctggatatgccatatttttatgtaggatcatatacaaagaattttgattaaatattaattttatcaaagacaaagactaagttgaaatgacagttcatcatatgttaatataatttcatataacataacttggcatgtgccttgtaagacagggggagcagtttatgtaaccacacttttcgagaaacattcttgaaagaaaactatccctgcctaattcttcccctctagtaatctaatttttgttgtttataatcttcaagtttttgtacacctgcacacttatttgagagtcacaagcagaagatggcatttacttttaaagttggcttgatccctgttttttaaaaactttttgtagagatggagtctcactatgttgctcaggctggtcttgaactcctggtctcaagcaatccttccacctgcttcggtctcccaaagtgctgggattataggcataagctactgtgcccagtcttagcttgattcttaagctccacagccagagggactctcccctttcctttgaccctctcaacatgttgtgtttcctcagggctcacattttatttggaagctgcttattactgaatttttaagtagaaaaacaaactttcaggccatcctgttaaatcaactcacccattatttatttgattctcagggcagtgtgccattagaaagctcaagaagctattttaaaaggtgtttgcattctatatgcattacataaaaatctcaaagagctgtgatgctagaccagaagacacataagaactgagatgatcactgcaaattcaaacaactggtcaacccaagaaactatccttttgctaatgagacagcaggacagagatggaggcctaatttatgagctcaagttaaaaataaaaggcaacatttcctactcagaaggaaaaattaacaagacatatattctgtggacacacagctggacagaataccatcagcttcttaaagtagagcaaagtcttaacagcatggcctgaacatgatctcttctcacaaaaggaatattgtgtgtttgattcttcaagtgactattcatgttctagttagttctcttttttccccctttatcctggagcctgccctctcatttcatgcccggactcctaatgttagctacaaattgcaacgtacagggtactactgccaatttgccaaatgtctttcatcaaacacggtacaaaaaaatctcagaggaaagtcaagatacatttacttgtcagacgacaaatgtgaacgcatcgggaggcagtaagggctataagctcaggggtttgattcataatcactcagctgctaaaacattctccacagatgcaagtggacagcacatttgtcactatgaaggattttgacacatactgatcacagggcagagatatggaatgatgctgctgctcacagaggttggaggaaattctgtctctgcagaatatggtcattattcccttctagacagagcattagcatgtccatgttactttggatttatttgttaaaaaatcaatccagaaatattttatgatactcttgtatttgcatttattccttctaattgttccttgcagaaaatcattttgatattccacccagcaagaaataagttttctgagtgaaaaatgaactctggcctttaaactgattagtactactaacaagcatgggtaagggtcatgatcacacacatttattgggaagaacagttaatgcatgggtaatgattataaatgttttatttatgtacatttaatatttaagtaaaatttcattatctagtggttttaaatcatttgagtgtccatcttgctgacatactcagactcctgcaacaaaacatctcatagaaacacgtttccttttatatggaaaatagcttactcatgactattattctcggctttcatcttcagcacacataaaccacaagtccttcaagttatttgagagcaattggctgttgagaaatgtgtcttgctttagtagctgctaatagctagctccttttgaagaaagatcactgtgattactttacctcaaactgtttcgatttgggaaaaccatcaagaaacaagaaaatatattatgggcttgatggctaaataatgacattcttaaaggtaataggaaaaagaataagggttacgcaagtgtcttacaagcctcccccacctttggcttctggtgtcaaatgaaaagaggattaaattggagtggggaaagggagggaaagacgatgggaagcgagctgagggtaactattaacacacatacacacgtacacaaaacattttctgcccagccagcaaccactgaagcaacataaaagccttcgttgaatccttcttttcatcttcctaatgtgtgctcttatagcagttgacctcagttgaaaagaataagtttccacattaagataaacagaagtgactcagacatctgctagttggggtaacttggcagttctgtgatcaacatcagccctagtcaacaccttagattaagatattggattaacacgaactctattgagtgcacagatcaaaaccccaactctctcttgctatctggtctgagtcacgtgatgttcctccaaaagtaacacttttttgcaggagaaatagtaagttttgacattcattttaaattttaaaaatcaagataaattggaataaatggaacagaatctagctatatgtttttaaattatgaaaaaatcaaatgaaaagagcaatatgtactactaggaataagaaatttgctgagaatggggaaatcaaaggggtaaaattagatcatatattttaaaaatatattaccctgtgatccattaatgtcataggctaatctaagatcagtaaatgacagtttttttcctatggaacagtaatttttatttacatatataatagttgatgttatctgcagccagatgtctggaagaggaagtcatttcaccctgttccagtccccaagaggctattaactttatactgacgcaaactaatatttagacacaattccctagctcctaccaaaaaatgtagctatctctctagtcaaataaagttagtatttttaaaaacatttcagcaggcaagatattatcaactgggtcctaagcacttaacatttattatctggcagccaataattgatgacaaaaaggtttctcattaaaactattaaagtgacaacctgattatatgaaatgatatgtccaacaacaccatgaattatgtgacctaatgttttacaaattcgattacacatgactttatcataaaataactaacttttcataaataacttatgatgggaaagtttgtagatttggtgattttctatatttattcacttgataatcttgagaaatctcaaaatcatggtcatatgggggagaagtaaatattcctattttatggttatcccactccatgtatcacattcagcagtcatgattatgaaatcacttagttttttctttatttttgtgagtacattgtaggtgtatatatctgtgggatacatgagatgttttcatacaggcatacaacgtgaaataatcatatcacggagaatggaatattcatcccctcaagcatgtatcctttgtgttacaaacaatccacatagaggtttttttaccacgaaaaattataaacatatatctttaatatttcctactaatatctgttttataatacaaatgtaaatcacatctctgaaaaacctgtgactcaatggaatgggaatgtttcaaagcattgcaacggcaatcactatgctgttgtattataagaaaaggtagtttaacttaaaatctatattgccttggtaagttggtacaatcattggccatgtatgtaaggggtcaacaccttaagcttcaaccacctaacaagagagctattgtcaaagtcatactgtaccttagaaaagatgaggaccgtgaggcacaatactcaagacagatctctaccaggaaaggcaaaggaagaatactggaaatgtaggccaggataatcagaaaacaaccccatctattgcacaactttgcctaagttagtgggttgatctctcttcctctctctccataaatatttgtgtacatttgaaataaacttaaaccttaaaagtctatcagaatgagaaaaatcacaattttacatattccacaaaagagataaaatgaaggaatttctcataaagaaaaattaacatcaaatagaggaaataggttagtgctaaaatgcttcaattaagtttatatataatgattcagtgactttaaaaggacagctaaactatatcccaagattttgctcattcatcagaaatcagcataattttcagtgaaaaagagaaacaaaaacacatatacttagagaatatttttaactatatgttatttccactgaccaggttttatttgggggtaaaaactaaataagcagtattctttgtatcctgaatatcttccacaataaaaataaagctatcccctaatattattaattgaaactgactggatctggaaatagtaactgaaagtcaaggaagtgaaactagatgctaaaagatccattcactagttacacatgaatttgtaaacatttagttttatatcttcaaatagccagaaccaatttctgccctaggatatatagatgtgaattcccatgtcagcctgtatctacacaggagttcaggttttatcctttagaaggctttatcaaaagcatctttacatgctgatacaggctccaccaaataatggttgttttcacttagtgacccatttcgaagcctcgtttaacagcgtgttcccaggtgtccagaaagagctccgtatcaaggtataattatgtggaatgcatcagatttatcgaataaaatcattctgtaaacaatttctatcccactaaatgcccaattataactgaaagaatgcagcttgagaaagcagggaaactatctgctggaaccatatcacgtaatggaaaggggttcagaattatttatgtctgtacagcaatttagaatgtaagctgttttctttttaatgctacatcactttagtcaaaaatataagtaggaaacttacccaagttctctgatcaggcagttggaactgggagcaaaattgaaacaaaaacaaaaaattacttctgtgttggtatctttattgcaatctatcctttgagaaattaacatttgtactaacttagtaatttttgcttatcatgtaactgtaccttgagtaaaagctttggaaataaaaattaaatattgttataactctgttgaatttcctctgtttacctaaatggaatgtttgaatcaaggttaatttccacaagaaagctaaatgctacctactagcaaatcttacagcaaagcagatgcttcctttttattaactactacttgctataaaacaatatccttaaacttagtttaattactaaaaattaggccatttcctgtaaaaatccaatctcttgcatttgtataatgttaataacaaagaaaagatatttactcaaatatgaatcactaaataacaaaaggataatgaaaggataatgtacttggaaattcactacttgatttttattagcataggactcagaccatcagtagtcagaacagttaagaacgttaatggaaaactaaaaagatctagctcttaatgacaaattctgacaagagtcactgggaaaaccttcagtgggttagaagctcttccaggagacacaaaagttatatacgcttaaaaatatcattttgcttggttaaaggagatatatattttgcttatacatgttttggtatatttaataaggaatatatgtagtttttaaaggatgaaaacttgattgcagaagaaatctaaccatatgaaacacttgttgaaagcaaaatagaagatgaagaacagaagatttaagtgatttttcacatcaatgtgtaaattataacttaggaaaagactgtctcctcagttccttggaatgtagtagcatgataatcagccaatttaaaagaaagaaaatataaaagaatgaagaaaggatagaaatgtaagtaaaagagagtctgttgcagatgtactcaaagccaaacatttggaaataaaatgtgcaaataaccaaaaataatattaaaagtatagtaaaatcaaaccaaggaataatagccacttttacaatagtgtaattgcaaaatgacttccatggatgttcaaatgggctatcagtgtgaatgcaaaggatccaaaataggaacaaacgaaatggacattcagaggtcacacagtaataacattccctgcatcttacctatttgtggccattcaactccttttcaaaattacagtgaccataaataattttcaatcacatatgcaggggaagcctctacaacgcttatttctcccttagagtaaactaacttatttgtaaaagaaaactagaagactaaatagttctcacctggcctgatagagcaaacatgcttcttcaagaattgaactaagagaagactttagaccctcagcattcatcttttaattttgatgtatgcattcatgtatcttttttttttttttgagttggactttcactcttgttgcccaggctagagtgcaatggcacaatctcagctcactgcaacctccacctcctgggttcaagtgattctcctgcctcagcctcccaagtagctgggattacaggcatgtgctaccacgcccggctaaatttttttgtatttagtagagaaggggtttcactctgttggtcaggctgctgttgaactcctgaccttaggtgatccgcccgcctcggcctcccaaagtgctgggattacaggcatgagtcaccgcacccggcctcttctaagtatttttgacagaatttttaaaatacgtattattccaaaacgcaataatatagcctaataatctttcaataaaattcaatatatttttatttactgaggtgttcacttatcactgattaggaattatggaatgggaaggaatatgctgggaacaatataaagatattcaaaaattgtaaaaccagacttgcccagagaataccactatgaagcatccttctttcttttccctaaaacattgagaatttgatcctccctttattattatgataacccaagaaatagggcagatattattcccattttgaaatgaagatccagatgctgagagggtccatgtgatttactccaatatacttaaatggaaaatgaagcaatgaacagttttatgcaagcacattagctatgaaatcataacaagcactaagaacagaggcaagtcattctgttttggctccttgatctgtgccccccttacttctgcagtgaggtcatgccaagaatacaataagcatcttttcaagcactcctagatacatggcatggccctggcaaagaaattgggcataaatatttatatttataataaaatgcttttgcacccactaataagagctcttcctcatttaggtccttccacatgccaagcacaatgctaaatatgttgcgtacataaatgccagctcttccagctaccctgggaagggtaagacttgatgaaagaggaagagggctcacctgtatcccagcttgtatcccagctatatatagcatgacacaagaaaacagccatgatatttataaaaacaatgaaatatttctgtaatagtcggtaaatagcctttgccctaagcaccctgagtgttcccctgcttccttggcctcttccccaaacacccctcagatagtcccactatccagcaaataaaacattggcagttgatgcagcaaaagcctccagtatcctgctccagaatggcagaaatccattccgattggtaggtattcatgacgcatcaggttctaagtattttgatcaccactcttgggtcctgttctaatagcaacatgcagcaatagggaatcccttacaccaagacgtgacattctggtgtaggagggaatcactgccactgtgctcccacaggcgtgtttgtgaagatctgaggaatgactgctatgctcgaagcactggacacatgcctcatcttttgtgatccttaattaactttgggaatgttaaaatataacatatttgctctcttatgattttattttaaaatatatacctactacattgctaacagctgcgaattcatacagaatgaatggttgacaaaactgcccatcttatgaactggtaaatttaccttagttagcaaaacatctttgaatttcaaagtggatagaaaccttacacccgactctctcatttttcaaacaggaaaactaagagccaggtagactaagatgttcaaagacactgaatccctttttggtttttctccattctaccgtgaacccatagcactcaattttgaaatggttaattactaaattgtaaagattatcagaacatgaaaatcacttgactactgtaattaatattactgtaattaatttttgtaacattaatgtatacatgaatattatatgttcataagtatttatttataattataaaggaagtatcaagagagatgtactttttgtacaatatctgacacaaaatatgtgctacattccagtttattagcctatgaaactttacaagtactatttagatcagtctaaatataaaatatagtcccgataaacattaactgttttgtaacttacttcttttccataaagtaattatgtgagtaacattctttaatcttcctatataaaattaatactaactggaatgtttctgaaacttttactgctaaaccacatattatctcattttgaaagggagtgagagttctttagtaatagtagatttatccaactaacccagaagattgtgttacaactctcatactctttattcaggactctagaaagatacttgaaaaaatacaaaagaggtaacagaaaggaaaaggaaaaaagaaccatatcccatgatctttatttaattaatttaattacctcatagctttccataagacagcttgcataaacttcccctgattttattagagaaccatcattttttgtttgaacatattacaacagaacaaattagtttattctatttttaagaatttttattaaaatgttgctatctataaagaccagagcttgcatcctttaaacaaaagtaaaataaattttaaattaagaaaccacattcaagatgtttatataccgtatttgttctttcaatacgattttccacatggtggaaaatatgtaaacctgttttttaaaattactaaatgtataaggactttaggatgaaccaattagagatagtgctgctttgcattttccttgcaatgataaactgtatatattttgataaatgaacacaattctattctgcaaatagcactgtgcattgtggtgaattcttgtgcaattacagagctttgctggaatgctcagtggtctctagataaattccttcaccctctatggtaacaacttgtcaggtagactcatttcctgtttttatctaagcccgaaaagaacaagaatgaccttcatgagtatgggacgagtcacagtatgatctatttcttagtatcagcaaccaccacacacaaaacacatcttggatatttattttcttaactgaatcctgctcactccaaaatgcactttaactcaataaacagttaatagcagacaatcatttaacactgaaatcatgttatttttacacatatattaactaatttttctttaaagagtttgggttttaattctgctagaatttcctgtgttcttccacaccagcgtcataggaaatcctaatgttctcaagatgtctttcatttcattgcacctgcttttcaggatcaacaagttagtttacaagctggaaatctcaaatccaaaatacttacttgtgggtgaaacaagaatcctggagaaggcctcaagtatttctcttttaaagcttcaagtgggtcagttagttttcttttctctactctgaaaggttaaaattagattttggagatgaagcagtctcacatatcaatcactacataatcactgacatttaaaggaactaacaataaagtcaatggtaggtttctgggaagcgcactcataaaactatagagacatctgtccagttcttggagattcctcatgacacttctaggtgcttaagaagaaaagttcctatttataatggaaaaaccctactgaatgactaggaataggaataacgagaaaacatgaaaaataaggagtcactaaattagaggcatttgtcatgaattcagtacctttccattccaaatgtagacaagaatgcttaatgattttgaaatcatgaggtcaaggctgattttgaatattagagcaattttctaccaagaaggtgttctcccaaatgtgcactttattccttccatatttgtcaataatagtaagggcatttccaagcatatacactgctagccactctttgaggttctctctctctcaatatatatttatatttaaacatatagcataatatattgatatataaatattttatgtaaattatatttaatatatattcagagagagagagagaatatatgctctttggatgccactgctgataaagaaggcaggcagatagaatgggtgtggtgagaagagaatggggagctttctgaagatagagagagacacataaaacttacctatatatcccttctgctttagaaatgtttgccattctattttgtattaagcacatagggaaataatatccctatgttgaattaattcattgaattaatttcttttaccaacttggtaattaaaaaaacttttagatatgtgcactcttaaagcagaataaaatacctaccacttattgatattatatatgtgatatatgtgtgttgcatatactatttcactttttgaagtaggtgatgttatatccattttatgctttttttttaagtctcagacatgagaaggctgaggttgcaacccaagtctgacactaaaactggattctaggtctttcatgagtttggcaaaatgacaggcctaggtcttaattgagacaagcaccagagagatgttggagatcacagtgagtaagaggaatgctagtaggtgatgaggatgagtgcaagagatatgtggaagaatcagaagccagttgctactgagagggtacaaaaaggaaagcctgaaaaattatcttaacaaaggactgagacacatcattgagttggaaatacgactttacccgaaatgtgtgacatacaatctacacacaaaacacggaagacatgtttttcttttttttccttctctggtaacaggactgccaaactaattgagatataataattttaaaaagcagccaaacttggtactgacagcactgagttattttgtattgtcctttgatactactttatcatattcaaacgagggtagtcctttccatactgacagtgtttccttgttaacgcattatagataatatacatagaagaagaattgtaagtgagaagaacttgcagctctagtacctattaagtaatatgaacttgataaatattgttgaattaaataatagcacattttctcttcacgaaagagaattaggcaaaatatgaaaatactccgatgttaaataagttcaataaaaaattatccagatgttccatgaactcttgacaatgttcaagattagaatgagaaagtaaatgtgaaaatgtttgtaatattcaaaatatgtaacaaacatattattattcatacccatttaaagaaaactagtattttaaaactaaatcactttggtcaggtgaatattactgaatattgccaaaaaggccttttattaaacttgtatgtttcaccccaagatttttttgctacatcaaaggaaaccggataatgaagctattaaacagagacattttttaagccaactactcatattatatacaaaacatattctgtgattaatatttcatttacttgggggctcctgagagatttatttagaaacaatatgaccagcccttattaaggatgtgttggtaggtcaaaaaagagtggactcttgctgttagatatcccccccattccaaagaacctgacccatttaagtacccacgcatatttgcattaatccttcaggatcctcattcttccgccacttgacaatttactttaaatatgactttcccatattttccactccaaaaaaagtgtttaaaaataaatttattgtcaagggaaaaaaattctgtaggcctattccaaacccccaacttcagaaacatccaaaaataagttcaaacagaatgatccaactttcagaataaaaaatgagttcactagatcaaacaacttcactctgttttataataatagtaaaaatgatgtgttaaaaagccatcactttacagtggaaataccgcctttcatacatctgctcatatttcgtcatcttccatacacgcttacctgtaaatagggtccataaagaaaggagtgggtcttgcatgctgcaaggaaccatctgaagcaggtcttgattcgacgttgcttcctttttttcccccaaacacgtggttttttcgaggctcagtcagctttgtcccactggctctactcctactgcccatacttagatccaggggctggtcttggcttgtggcaggtgtcactggaggcttggaggggactggagtcaagggcttctcatcctttcgcttagtggtgagatcaaagggggactcagagctgcccttctgcagtttctttacttcacctggtgattggggttccattttcaaaggtaacgatctcaagtctctatcaggaaatgggtacattgattgagagaatgctggaaaaaatgggaggggaaacatggaagggtaaggtaaagctccaacttttttgtcttgcagccccaccagtcctgttgaaccaaagtatttttcagcaatagaagcaatagcctttatagaatcattcacagctcctgacaccgcagtctgctcctctaaagatggtgagaaaatggaatgattgctgtattctttcttattatttattgaagccagattctgaagagggcttactttgtctttgaacattttaccattttctttaaatttctctttatcactttcaatgtcactttccagatcagagcccgaggttgtttccaggtcactgccacttggtgtactgacatcatcaaggtcactactctctgactggtcactgattttctcaaagggcctctcttcagaggacctctcgggctggagctccactggcttattgtcccctacagatgggtgtttagatagtgccttcaaaatatcctgtgtagctggcagtatctgaggatgtgtcatgaggggactttgacttttgtttgtctgttcagtacttgatagtcctttaacaggagaactagcaggtatcaaaggaggcctgtggtacaagccggaaggaaacagaccagggaagctaaaagaaaatccaggagctgttggaaaggtaagaccagcaggatgcctattggcgccaaaatagtcagcaaggcccgggttggcatgactcatattaaccatggacgttttatccatagctggggttccaggaagtgaaatgccttggccaaaaaatccacctgccgcaaaatggttcttgccctcacaaaacctcctgtgtttatttaaggaagacgtagtgctgaacatttgtccacagtctttgcacttgatttgggttctgcaatcagcatgcatgcgcttatgacggcaaaggtttgaaaactgagtataggatttatggcagacctcacctgtgtgcaaacaacaaaaaagaatctcaggctttatgtcaattgcttctgaatttagcaaatatcacaattggtttactcaaaatttcaattaggaagccagtaaaagacattggaggcaccaatctgggtgctccaaacacagaaaaccccatttcactagattccaaagcaaggcaaccaacctgacaaatgtcttgaggcagcacaaatatttcatatatatagatatatatatcttgtcacccccttgtgcaatattttgcataatatttgtgtatttaaatatttatgaaaagttaaattccatcatgcattgattctccacacaattattatactaatataatgttgaaaattagtcttaaaatgcattacgtacaaaacacaacaagaacccctttcaaattttagagtacttaaaaattctattttgtaggcaccaaaacaaaataaaatatcctcaaccagaaacttcacctttattgcctctccccttggggaaaaagcctgtgactgccctgctattatttaattggtattatatcatatgctctcatcattcacacatcaaagccacacaacaatgcacattgtgtattctgagactttttttaacaatcattttcatgatttgagaaagactgacataatttacaatggctctattttaagcctgcaaaggaaactaaattgaatgtagcccatcctgcattgctggttcccatgaactatgatcacgtcctctgacttcccctcacaccagtggttgtgctaaccttcctgcatttatgaaaaccccgtccttgggaaacatgtccacttgttgtcatatctacactggttatctcaggcttgacttctgtgtgttatagccaactatgctcagtaggggagagcactgtgaaagctctaatccagaaagaagggcacagcattggatgcagctgtgaaatatgcctctttgctaagaatttgtcaataaagtagaatcttcctcctcacacatgtgccactatagccaagtatattttaagaccaaactttgtaacccttaataactcctttaccaggtaagaatcactcacttcactgtccagcagtattacagtatcagtaccctgagcatcacattttttattttactttacgggattgagccacgttatgtgtgagcttattttaacacttctgtgcatgttcaatacatgcagaaacaagatgtaccttgttggtaattgttgaagcaaatttattttaagaaattaaattgaagacaaaatgcaacagttattgctttcatatgatggctgcctttaagtgcagaatgattgtgcttctaagtcaaagcaataataattaaaaaaaaaaactcatgtcaaggagattttatagactttcagtcaagcaaaactcacccagagcttggattatcccacatacatccaaacaggaagtaccaagtaagggtatatctctttcttttactactaaaggttaaagtgtattgttgcatatatcaaagtgtttggtaatattaaaggtgccttcaattgtgggatgaatcacaacgttacagaggctgtaacatgcattttaatgggaatagaagatgtgggtgatatcttttcaaattattttaccagaatatatcgaccagagtcagctttaaaagtatatacaatttaaccatacaccataaatatacatctaatttaaactgtttgatacactaattaaaatcaaataatggagaaggtagaaacatcagatgtttactagatatattagaataatttatagctacaagcaataacaatattttattattggaattataaaaagtaagaaagcaacacctcttaaaaggcattgaaaaaatgtcttgatgagtattcaaccaagacataagtttttcaaagacttgtcattttttggcaaggaaatgttgctctctacacttctttcttacaatcagatggcttaaaaaaaaaaaatcaagagcttctctctattggagtaacagaagttcagctgacttttctggtggcacccgttgttacatggctgagtgctgtctgtgtctgggctcaagaacatcgaatctgggatgttttcttaggcagaggctttgttttcggcacttgaaggcctggcctggcataccacaaactaccaggcctccaggtaaactggttcaattgatgttgaagtttatactctactgtaattttctcagtaataaggaattagccagcagttaacattgcatttttctacttattaaacaaattaagaggcattttgaatatattcagcctattagagcatgtggtttctatttgggaaagctgtaggtttctgtaaaggcagtgagtaattaccttagcactggtgactttgggctcaagcgtggcagcacactgtaataagagacagttgccataaacacaccagtgggggtaaatcgtggtgtgtggccttctggtgagaaacagatatcagccctaggtgaacctcctccactcaagtctccacaccatttcctgatctttaatctcttttgttctgaaattacatggctattattcataattactccatggttctctggcagattttaaatttgaagaatgccatctgctatttaaatttaccaataattactgaaaatacattcaagggaaatactttatgcaatctgattggaaagggacaccctatggcactttaaagtgaaacacttgtcttcaacacaattaaaattccagatcccagaatcttcgatagcagaagtctatattttctgacttttattttaaataatagagaaagcattaaatgagtgatcagaattccttgtggtttattctagttttttctcacatcaaaacataataaaacttaccaaaatttatttctgaggaatcagaaataaatgaactatttaatatcgtatgcctgtagtacttccaagtacattttcagggcattaagacttaagagtcaggaatgcctttttgcgacaagaagtctaaaatttctattgaatgctttatttcccgtgaccttcaatagagcttccccaagggagatgagagcacccttttttaatctgctagtcctcttcacccggggaacagaagagcatatgagcaaaacaggactctagtgtaagctggaaaaggaaagaaaagctattttggtgcttggacacacaaaagaaagctgtgtcgaggcaaaggagagttagtctctggcatctccatgttggcactgaaaaatagttttttccatcaggtcctgtagtagtgtctcatatacctactacaaaccaaagtcagaggtcttgccaagtgctgagtatgcttcaaccaattctatgtgtatctgggtccaaaatcagtcttgacgtttgtagcacaactcaataagtcattgtatttatatgccccgccaagcaatggattaaaagaagcccagattttttgcccaggtagactaagaacaactgattttacttataaaatgtttgagcacaatacagagaataggagtgggcggagagaagaaaaagcaaatgagagctgagttttattgtatttgaaggatgttactacagtgctctgtacagggatgttctaagtaggtggtcagatcagatgtcccctaaaagcacactgcctataaacttgctttggtgcagtgggtaagagaaacagcatgtccagcatctaagtgaaaatgttctgcttttcttcaagtaacagagaactacagatccgacagcctgtgatcggcaacaatgggtagattaaaaagcatttcatccccctcgctctctccacacacatatactcacatacatgcacacagagccgtaagcctacttcccaggtgggcttcttccagctctttctgatccagaacaggtttttaatcacttcatcttgtttagtgatggctgctatttgctgctttacaaagccatgaacatttacaatatgagacaaatctgattgtcctgattaaatcctacaacctgtggaggtttccctttgattatctaatgaattttcttttctctacctgttattgatttcttctgaaagaaaacaccccaggaatcaaggacaaaataccatggatctgattataaaagatttacttgtaatcataaatagccctactggattggaccataaatagctaacacggtgaccctctaaaggccatgtgcagccactctcctggtcacagtgccttttggggaagagacagatgtgggaaggagggctggagtgttgaaaacttacagataaagggcttcacactgctgtggatgtgcttgtgttgtttgaggcccgacgaagtggcaaacgttttgccacactccgggcatgcatgggcccgggcaccgacatgctgagagcgaatgtgccgctgaaggttgctagggtccgtgaaaacctgctaggaaatgagtactgattaatcaagaaacttaactcaagggcacaataaagaagacccgggatgactcaagaagaaatttttcttatttgttttgtttttcttttccccaaagaccaaaagtgtactctcctctaatttccaaaatgtactctcctctagggtaggaactgtaaattattctgctctatatccttagcatggtgtatccactggtatcagttgaaccaaataatgaatggcactattaggccatattcaaggcctttttgataccatttagagtgacttgagttgaataataaaatgctggttaagccattattaaaactggtgtgctattttcaccctttaaataaagacacattgtgtacaaaaatttggaggattttgactaactacattaaatctatttaaagagtttccctagggcgtaaaattctaacactctttcagtgagttactagcaagctaaaaccattcctttagacattgtactaaaaacaaaaataaaaaagccacccaacacatctgagagcaaaacatccctaaagaaatttcaaatgtattttttaatttttatgagaaaaaaacatacaaaattttaatgtgcatagaacaaggtaatcacaggagaatgactacccagtaacctggtggggtacagaaatttccattggcatgaaaaaaaaaaagctattaaaatgctaggaaatgtgttttggaaatagaaagcaactttaatgacaccaggacatctttgagttaatcaagaaacatgaaattaaaagaagtgaattacttttaccatagttcacagttatggtctaagttgagtacttccatatcatccctatgttgttcagcactgacagaggctctatacattttaattagaaccaagtcataatttatggtgagcccttggttggaaaaatctgcaaatataagagtcacccattctttctgaataggcattcagaaattttatgtgacttcctcacaaattgctattaaaagaaatcagtaacatgaattggataaaattttcattctccgcaaggccataaaacaactccacactggcaaatcagtagcggaaccaggaatttaccaaggatgtctgacacctagttctggaactcaccattaagcctcacttcctcccttacaaaaataaaaggatacccactaagtgtttttatacactctactaatgccttttagcatacaacactcagtgtacttttctcaagatatttatagtttcccctctgaaggcttgtttttatatatcgtagcaagtgatggattaagagagagcaggatgacatagagaggccaagtagcctacaaattcactgtaccttggcacagttttcacattcatagtgctttccactgtcatgtgacatctggtggcgaattaaattggacttccagttaaatgccttgggacactgatcacacttgtattccctctcttcagtatgtgacagcatgtgtttctccaggctgttaagagaacaatagattttaaaagacaaaggatgcattcataaacggaacaacattttattgttaatccaactggtaattaaagaaacaagaaggaaaaggagttgaactgagaaggagggaagagcagaaacaggcttgtgacagacaaaagtgcattttatatttcctggactgtgtctcctggactgtgtcaccaatatgaagatgtgttcttgttgttagaaaataaatctgatacagctggcagggattatctgccaatttaaaagcatgataaacaacaagctatttgtccagttttggattcactacacaattctaacaacaacacgtattgctaatactcacttaattgaaacacaattaagtgagtattaagctcacaattaagtgagtagtcaattaagtgagtattaagctcacttgtgagcttaatactcacttaactgaaacacaaacactcaaacagaaaatgcttaaaagtattctgtctaatgtatataatctctagtgaatctaggatggacagatggatggatggatggactgatgcatggatatatgcatggatgtgtgtgtgtgtgtgtgtgtgtatcatatatatatattacataatatataaaacctaagaattggggagcaaaaaagtgtgtaatattttaagtggatgcaacatttaagtcccctaaaagaaaaacatgattagaagtttctcacaagcatagtttctctgttttaaagtttaaattgttttatcttctcaaatgtttgcccccattttctaaaatttgtatatgaaatctgcatgaatataatgaaaagcaaatattatagataatggattatgtgatagaagatgtctgcaacacctttattgattaaatacataacacactgggatactacccccaaataaagtaaccagagctccgtggtaaaatagcttatttcaaatctgaactatgaaattcacaagatggcccttgaacatcttgttatgacaaaaggcaagcaatttatagataatatccaaaaaattagggttccaacttgaagagatgcccactgaccaaaggtggggcaagtgaagcatcaataagaacagcaactcttttatcaataaagatattcaaaacacaaacagaaccccaatggtctcccaaggaagatgcaggaaagccaaatcattattcctaaaactggtaaataaagggaaaatatttgtgcacatatctgcttttcctatgtaaactgcactttggggtaaacaaataggctatgaagggaaggttctctacgcgaaattaatccaggtaataaatgatgaaacaatgatagagttagagtacattcgttttgaagctcctaaagaattaatgaatctaggcaatccattatgtgacttcgggtagaaataaatggcaccatcaatgaaatcttcttggtgaaacactgagcgtaaatcccagcaaaggcttgggatgtaactacaagtctataggaaattagaggggatagagaaagatgttaacaccacaatgatataaacagcagaatccaactcagtttcttctataattttctataaataaattgtaataagagaaagaaggtggtggagagagagacagacagagacagaaagagacagagagagacacagagagaaagagactgccctctgggggagcctttagattcaaatagtcataacagacttgtcaatcaattgctatatgtggactttattttgatctttattcaaacaaaacagtaaactttataactgaggaaatttgtgctcttactgaatatttgataatattaagaaattatttttaatgtggtattgaacttatgtttttaaggagtccttactttctatagacacatactgaactatttttgaataagatgatatactgtccagaatttgtttcaaataattcaaagcaggtataatgacaagattggcttcatgtgataattattaaagctgaacatatgggattttaaaaatcctatccgctctctagttttgtgtatatttgaagcgctccacaataaaaaacttatttagaaaagaaaaagtaccaaccatgaaagcattcttttattttcttttatttctttgtgtgatgaatgctataaatatcagtaccaattaagacctttgtgcacctagaataaattatccagtggtcatacagactgtgtgactgggagtatatgtaagaaaatgaagtgcccattctcatatcttgataaattagaaatgcatttcctaattttctctttctcagcttcctccccacaactctattcgtactggcacaagaactcatttttcctgccccatgaatcaattgagttggaaatgctattctgagcacaggtggtgatacctctgtgaacaaaaggtactaggagagtacaggtgtgtggagtcataagaaaggccctaactttatctacgatatgtaatcctctgtttgttacagagtggaatgttaataaaagagttaagacagagataccaacaactgtcgttaacattgaaatgagtcagggacatcctccaaaatcactgtacagattgcaattctcactgtccgtccctagcaacccatacaggcaagccattttatgatatatattctactatgctatatatcaaatcataaaccctgaaatctagtggcaaaagcttggcctatatgttgagttttattcctccccctaattccaaggatatggtttaattttaagagtatattatgaacatgtaggtgtaaaaagataacaaagcaaaaggaattttcccttctttgtttctaatcgggcagaaactccatattgttccatagtattattagcttccagctaatcagtaataaaaagcacaaaaaagcaagtcattttcacaaaagtaaatgtgcattgctttcataaacatagaagcaatgcagtcagtcagtgagacttctctgcttttcgtggaattttatctcaatctatagagccttgatcagacttttgagttcttttcagttcttttcaccttttgcacattgacctttgtttctttcttgctcctatttttttgtttgcattcttttctcaagattttacataaaggatagacagcagaagaacagatcaaatccagaaagtaatttttgtcatttaaagcataaagtgacaacatagcattcaataaaggaaaaaatattcagaaaataaaggttctgaatgtggctagatcatataatttataaccaaaaataccagttggaggattagcattcaattgcatagtgacatgctttatccatatggctggactaccaaaatataaatgttgagaattcatgcaatgacagataattagatttccttattgttttctactaaatgtttgactgaatcaactaaactaacagttggtttcagcattagatagagttgactcaggcttaatcttacagctaggcagattaagaggctttctccacccaagaagtattgctgtacactcttagtagaaagtaagaattacattttagtgtttagttggtcaatttttgctttataatgccgttcattattttttataacacaactgaaggaaatggactttatttctgacaccagagatattactttacagtttaaatattttttcctactcatttgtatttgttagcttcattttttttaaatttgggcacaattatattaaagggacatgctgtggcttttttattacaaatccacactttactaaacatacataattgatttattctctatgaagatttatatgaagtggcagaggtgagtttaaaaagttctgggaaagccctcttgttcggtaaaatgtttactctctaatagctaaattagtcctaaattttcaaagctagatacttatcctttctattcagtcttctcaacagaaaggattatgcttaatgccttttagtcatttatgccttaaaatgaactactagatgaaatcctttcctaaaagaggcgtaaccaggagaagaggatatagggctaaacatgaggtgaaaatgagaggaagaaaaggatccaggaaagaaggaaaggaaacaaaagggtaaactgaagttggactgtcaaagacaaaatctgagtaattcccattcttgagtaaggccatttgatatactaccattcccatttaaatataatgtgatgttcatttaaaattctgattacaagtttcaaggataatttccagatttaaaagcaaaatagtgaatacaattattaaaattatttgtggaccaaggcaaaaatcattaggtagaaacaaacaaaaaaacccattaactgttctaaactgttctaatcttaaagaccattctgtagtacaattagtatatacttttcaaaaagtaggttctagtgttgttatcagcaattttaaaaagttatagaataaaattcaaaaggctataaaaagttaatatgtcactgaaatataatttttattgtgttaaaaataagtgttaaagaattacttcatttacgttattgtgtttctctttttccttttaggaaattcaacactttgggaaatcaaacatgcttctcttattcttttatatatatgtaatttagatcaattgttgaaattaaatccatgaattactgctctatcaaaagatcatttacctgtcattaagtgaataccagatctagtcctttaaaaaatcatctgaatgttcctaggggtagctttattgtttcttgacatatgattactttaatttgttccagcactatattttctctaaatcacaatttactataaagttaagccttcagtttttaataacactacttaataataatataacattatttttcatctgacatcaaaataactaattccaatttcactgtaaatgttttacagatgagaatatccaggcaaatatgatttctgaacatgtcacgagtgcatttgtccagctcactggagttccaaattttccatctgcacaaagcctcaaaattcagcataacattgcagaaaaaatacacaagttgtatggtacaacatgccatttctaacctttgcaaatcaggaaaaacttggtcacattccttacactcctggatcgtgtgtatctcttggagatcattctcgctttcgagtttttgctgaaagtcctcttcaaccattgaaaatgctgagtgaggagtactgcatggaaacttttggtgatctgctagttcagccttagattcaaagagctggtcacagtcttcgcagcgatattgccgttcttctgtgaaaacaattcaggtgttaggattgggtggtcaggaattgccatcacaaaccagccaatcttaccaaattttacaagacataataggtattatttgattgtcatttctatcttgtcaattttaatctggattagaaatatcatatgtaaagaaccaaggacagagactggaacaataacataagcaatggctgtgactagagtatattcctcctgatcagtaaaactttttgactaaaccttttcaggtccagagaatactaaaaataataaatacgacttactgagcatcatatattttctcaaccctgtatgtggattactgacattccttaaaacctgattatgaggaattgtaagtcagatttttatcctggttttcagatgagaatttcaggttcacagaagtcaaatgtaaacagtcagggagtatagagctatgtggctgtataaggttttgaaaccatttctattccatacacttcttattatgccagtgccatattatctggaaagaacatgggacacagagtccctatctgagccatgtttaacctggttaatgtcagcaaacttggaaatagtttaacattcatcatcactaataatgggacacaggatgtttttagtacccttctaggctaatttatgttaccccagggtcagtgctaattgtcatagctttgttaaatagaaaacatatcattaatttgcactttaaatcaataagataaataaatggtagtagtgtggtatagagataacaaggttataaaatgtcaggtagtgatggcattgtttctatttttgtcttttgaatagctttcagcccactcataaagccacactccgcacagatcacacagatacaatcacagaagtcttgaaaacagctcacactgctaaaaaatacccacggcaaacaatatgacacataatccctcttttatagacctatggccaaggaagatgttactcttcaattgttcattgactgaatgttttggggggaatactttagtccaagaattcttttagtcaagtattctttttctgaaaagaggttcagaaaaggctctgtaatgagtaagaatcagccaggtgaagtggaaggagggggcacatttcgggaaatgggaagagacagaggcaaaaaagaacatggcacatccacagaaaggtagagctgtagtaaagtatggtaggttcacagagcacatgtaagggaggagtggaaaatgaagctggagggggtgcagctcaccaggggctttataagtctatgctaagaaggaaaacagccattgaaagtgggaaagcagggatatattcagacttggtttttagaagaattttcccagtttcagtatgagaagtcaagcagagagaccaagtgagacactgctgcagaaatccacataagatgctggtttagtttatactaaaccagtaacagtggtaacagaaatctttggatttagagggtcgagagagggaagtgttctaaaaaaatcaacttggctctaaagacaggattctcaatgacattagctggttaggagaaacatttcctatagtctgtaatactattcatttgtttaagatctatatttaggacctcagccaggagtccgaacacaagcagaatctctaggccacatcatgcatggaaaaagcctaggtatcagagacagcaaagattttgggttgaatgctgacctcaccacttactagccatgcattcttggacaatttacttagccttaattaggttcagtttccctatatgtaaaatggatataatttctttcccacaggttctatgcataaaagagtaaatgagacaatatagagagagtatataatatctatcatatagtaggtgtgcaatacatgtgtttcattttctttcctaggaagagttgaatcctagaagtataaaatacaaatcatcatttaaatattataagaattatatgtaacatatgtagtgtatgtatggatgtaaacatgatatgttgaaaacaagaagcaactgatgggttcaagagtgttgtaaaggaaagtaatttatgaatggcagccctaaaagaacagtcacttctatttaaaacttttggagtattaacctaatcattaatattaaataaaaataattgtttgaaaacctttttaggtctaacatttacagatgaaatattcattgcaccagagaaagcccagattgcagttcttcatcatctaagaactccttgctgccgaagagccctttcccattgggccagacaccctcttcaggctcaaactctaccaggctaattgggaactctaggtttctaaagctatttgcatgtcagagttgctaagaggaaaatgagtaccaaaagcgccccccgcccccgccgccagccctccccctccccctgcaaatacaactactcttgtataacctacaaagaggcagaatgcagtccaaaggaaaaattgttcaagtaaagagaacccgccaagagtggcagcttcctggagatataaaagcaaaagctgagattttcccatctgggatgctaaagagatgaagggtggtgatccctgactctgtgatgggttggaatgggtaatccttcccaatagaccttccaactacaaaatattctaaagatgccactagattatgttgaaccaaatcacagtatacttggacacagaaagaggaaaaagaaaaatatatattaaatttccatctcaatgacacaaatcaatataagcaaaattttctctttatctgacctaaacatgtatcactactgattatcattattttttattatcttttgatttagaataggcctctggcaaataaaaagtcctctgcctctataatttcttcatctatacatttttcccaaggcctcttccctgacacccctcccatatggtcatattggctaagattttcctgcagtagaaacacttttcccagtaatagaacattagatgacagaaacatccccttgatttaggaaagctcaaaatcaagctccctgaaagatccgttacacagtgaaaggattctcaccataaactaatgcattgacaaaaggtttaactaggtgaggttctgcgcaaatgctcaaaattcctttgacctccactttaaggaagacctctgcttacttcagcttcactgtaatagtggccagatgtcaaaccaagaaaatagctgcttcaagagaaggaacttgttgaaactgacattgaaaagccagggaaactaacaaacaccaggaacaatggatgctttcgatgctactttatagtcgcgatgataaggtgataaggagggtggcgtgagtggtactaaccgtggatatccggcgccatagtttcatggggatagtcttcgctcttcatgaacagcagaagctcctctcccggcgcaatgtctgcaactactctatagaatatctttaaagacaaaataaaggtggatggaatcaggaaagagagagatgtatatatattaacaaagggcaagatatacactaagatacctgtacaaacaccttaacaaacatctttttctttttcttttttatcaaaagaagtgtgatttcctgttttatatattgaaaaccagccctctggtgacaaatggaaagctgtgactctcaagccagttcacaaatcttttccaaatcctacttcacaaatcaaattttcttaatgcaaggctagctgcgtcacatatatcctgtgtaatgtttaacgaagaactttcccttctctgaatcctcaaagcaccctagcaaaccacacgtactcacagagttgaatcctgcctggaattctccagcagtagcctagcttaccttgtaccttccccacttaagcaagtttgcaaaagtagcgccttctcaacaacgtgtttggaaggtaataggttgaaaggacatgacataaaggatcatgacaacaaaggagagtattttgtttttcaaaacttaacccctctctcaccaatcagaagggtgctcccataccagggtcctgccctcaggcccagctcctgatcctctctctttgaaagtaggcattatgcattttattgattcatttattggggtggtgggggtggtgcttattccccttgctttctagcaaagtgctgaggagaggaagcatttaataaatctgttaatgactgactcaaaagcagtggagcaagtgtggaaagaaccctgacctgaaatttccaagagccactgcctttctcctgagcagcttggtgacttaggcaagtcattgtccaacttacctgtccagggaccaggttttttgttttttggtttttgttcatttaaaaaagcttttaagcatgaaaatctttagatgtttattcattctaccataaaaatgtcatcagttttttttcattctaaggttatttattaaacaatcccataatcagatagaggttttagaagaaagaatgaagttctacgattaactggtgaaaatgagaccaattatattataccacagtatctttgcaaaaccctagagtactctgagaaggaaattattcctttgcctcatatattcttctctctctttaacagtgccaataagtcttttctcccaatcttcctaagaatgtccacaaacagaatcaatctcttttttcttttctttttttttttttttgagacagggtctcaatctgttgcccaggctggggtacagtggcatgatcacagctcacagcagcctcaacctccctgggctctggtgatcctactacctcagccacctgagtagctgggactacagcatgcaacaccacacccagctaatttttgtattttttggtagagatgggatttcactgtgttactctggctggtctcgaactcctgggctcaagcaatctgcccatctaggcctctcaacgtcctaggattacaagtaagccactgcacccagcccagaatcaatcttattaagccaaaaaagtccagattctaaatatctgagcaaaacacatacacacacacacacacacacacatacactaccaaaacaataacacaacaaccaccatcatattctaagaatatattcttagaagatattactgttaactatggttttttgcaagatcacatgatatttcaaactaagaaaagctgcataagttgatgtcttataagatcagcagaaatgctcatactttaattttatttatctatttatattttggaaagatgagaactttgtacgtgcctctttattccagtaggtggctctaaagtccaattgtttatttttctataacaagaccggagcacaaaattgtgctaaatttgaaaaataacttaatgaggagtattttctgcttagcttctttcctgtcaaaataaaataattttttttcattcaatagtagttgaaccacctgaagctggtttatagaaaacaatgctaaacataaaatgttgctataatatgttataatataacctaagattctttgtatttgtccacagatagaatccagactaacttggcaaaattactcctcattatgtgctgtttctataaaaaaaatagtttatttgcactttgtatcctattaaccctagctgttcacattttcttttccttggaagtacactgagaacagttctttttaaagattaccagatttaaaataataataaaataatgtgtgagtttgcttttttcccctaaactttccagttaaatacttataagtacactgtttcattctggagttctatttccccttagaaaacaatggacttctctcaacagtttgaatcacctctttttttggcatctctcaaaggtttaacttattagcttcctttccaacaacatgttgacatttgaattgtgacatattagaacttttcggtggcttctcggaaatagtgaggttaaagagacaataccctacaagacagtaaaacagtgcaattgtctctattggggaatactacttagacacacgtcaggtcattttaagagagtattatgatatcattatttctttgtagtccactattaatcatgtctcttttaattccattttagatttactcaatccaatgtgaacagtctaagaaacaaaagaaattgatggatacactgtaactatatattataaagacaattctctttgccaagacatagatcactactgtaatttccctttaagagtccagattgtcatgtgaagaatattgagtgcatacaaaataaaagacacggaagagtgttgatgttggctttatttactggaggtaaaaggtgacattccaagccatgaaaggcaaagaaaagcaaagtggattttaacttcagggtgttcttttcaattttaagtgagtttttatggtgctcatgaaactgaggtttgaaaagaactggcaagcgccagatataatgagggcagattctgggcatgcttccccatatagcaataagaatgtccctcgaagttccatttgccatacccttaccaagctagtccttttctcaaggtgtttctaccacctgatcttcattacctctcatcccttagggttttggagacacttaagcaacattgttttcctcttctaattacaatggcccaaaagtataatttgaatccttgaatctagggatgtctacatataaatttaatttactttctaataacattaatggtatgccagcaggcatttgagaagagacaggagtaatttaaatgaaaacaaaatgaaaatttgtagccctgaaacaatatagtggggaaatgatgggatgtcatcttagaggaatcaggcctttcagaaaatatacttttatgttataaaatagatctttcagcaaataaaaatgcaacaaaggagtgatttatatagattttctcacatatttgtatataataagtatgtttgaccatgcttataaaatagagttataatgtctttaaaatctgtattctcaaaatcttgagtatattgcagtccagtgaattacataccatctgtgttatgtgccataagcagagacactactaatataactctctcatttttgtgttggagaaaaatggaagggagtcaattaatctgttaagttccataaaacagttaataatgggtctcttctcctatcagggttttatgtaaaaagttctctggattcaaaataaaaatatcctggatctgaaattttgtaatgaatatacccccaataaataaagagaggttcaaaaatattcaacacttagaaaattttgagttaatatgaaaaggttgttcatttgttatttttgctctctctctcagaatgttctatgagaagaaaaaactcaattcttcccaatataaggtgaaagacaagaagaatggggcctataagaaaatagattatatggaaattccatttttttaaaaagtcataataaatattttaaaaccgtgttaactcctccaaaactttctatttggtagctaataccaaaatccagaagcacaacatgttatgaactaacctaactcccatacatctgaaacttttgccagttgagatggttttttcattttatcacataaaaaattaaattttcccagtatcttgctagactctttttatttttctatgaagcaatatttgtgcctttgtaagtatgaatattatatttggatctctggatacctcaatttataaggataagtttttatagtaaatgttttagtaacagatttcttcatgttcttttatttttaaaatttgttcaaatagcacactagtgaaatttctaaatgtttatttaaaattctaaatgattcaagtagttgaaaagtaaaactagaaatccaaaattgttcagttttaccactggtaaaacccacagcttaaggcataattataatattatacatgtatatagaaattaaatgccctaaacagaattattataattaatttattttaatcaaaccctgaaagcaattccaaatgcaaagagaatatccattcagctaatactcacaaggctaagttaagtataaaagacagtggtgatatgaaattgattgagcaaatttagacttccaaactgtacattttcatgtggtgttatttataaatataaatgtgcttagatatattacatattttataatttgacataaacatggcaaagtatatgttttggagaaatttttaaattttcatattagtaatctcatgtatataattctatataataagaatgaatgcttcatggcacatgattaattcttattatatatcatacaagttatatgtaattatatattatgttttataaaatttatattatatatacttggaattagaattaatcatatatcattattcattttatttggttaagtccaagatgacagcagtaaagcaggcatagacactcataagcactttgataggaaagttaatatgccataaaagactttcagtctaactctgttttatactttgaaggactgctttcaaccaaatcctctatcattagttttttcaaatggtaatcaggtgggtcttgttcattatactagagaacaaaaatctggaatctgtcagattctttatctgtggattgatttgaagtattatgtttgtattgttgagacagaaaagttctgcacacaagggggaaaataagaaagaaggaaaacacatttacttttaaaaagatgaacaaggctttattgttatgaatccccgtttatttttcctgatcaaacactggaagttttatttatgcttaatagactgcatttggcatgtctaaaaatgacagaagcgtgaattatgaatgaccttcaacctatgcaggaagttgtaataattgaaataatagagaaatatactcccagcaaaatctgtactgagagaaaaccttttctggctattggtgtcttttcactttgaagttaacagttgatttcttcctcttccagctcccaacatttggcctaaatgctttattttctataccttcattcaatatactttctgaagacaaggaaaagctgaatggaacttcagcaattggagggtgggtaggagaggaggtaggtagccgtttgcatgtttgaacaaagtcagcatttcatatggacatatctgtcagtcttggtactgcagagaggtggcatcaagtctacagatacaatatatgcattaggaaacatagtctggaccctgatctatccatagtaatgtgggaaactccaattcaggaatgatgtaaattttaataggagtatctgcaggaaggatcctattatacattctgagcctaattaataagaggtaaagagaagtgtcttcagcagagattgatgactgaacataaatttgttcaacactatggaagctttatcatggctaagcattgccaaagcaaatcacccttagtttctccaaagaaaaagtatcccatatttgtcttcagggtcacagtctaaagacaagaaaatattaattgaaaaagatcaagtactgccttgctatatccacttcctaaatgaaaaatatgactccacgagaccaagatatctttggtgtggaatttttttcttctccacatctttatctctttgtcagtaacatgaagagaaaaccaagtataacttattgaatgaaacaaaacagagagagaattgttagttctagtttgcataaatacggcaattgataaagatgcacattattatacacgaagcttacagtgtacccagcctgaaagccttgcaagatgtctccttaaataacctctgagggtctatctacagaccccccaaaaatatccattagccacctgtctttaatgtggtcatttcatctgactgtataaaaactgatgttcattttgaatggtttccaaacctttgggaagagttccatcattacattacaaagaagctaaaaagatcatctttggtgttttacttggctggaggcttctcttgtgtccttgaccaaaacattatcctccttcatggcttgtaaagcattcttatgacttttatatgccctcccagaaatagttacagtctattgtgtatgtgatgctttgtgatcttcctgaatgaaaggcgatatatacatgcaaacactaactacttaaaatgtacacttaatacttcaggtcaccctctctttcaacttatgcagtttgtgaatcttaacaaaaatcctagcgttatgtcagtgttgcatcctaggtattgttacatgaaggaaacttcactggggcaggggatgaggtgatgtttgttttatgatgtaaaaatcaaatggcaaactatgtttgaaagagtttcatcttcaggtgaaggaagtaacttgtcagccagacaacatccccccaaagtcagcttaggcactgttcacaaagccagtctctgggtattgccagctggcattcatcttaaaacagcagagcataactttggtataaaagtggaacttgacttaaaagcaaagcaaagaaaatgcccaaagccaataataactttaacatcaaaagaagtggtacaaaatgtggacagatacccttgtaaaggaagagcaaattaacaaattacctgacagtagacacaaacatttttaaaaagtataaagagggtaacaaattacatttttgcagtatacatagctaatctaccttgctgttttgcacaaattgtactaatcgaaagatgcaggaaagtggattttttttcatagtaaaatccaaagaaaataataattgagcccataataagctcacaataaaatgctgttctagtgtcacagcagtctgatataatcattcacgtggacctaaggagagcgaacgcggggtgccacatcagctaggatcgtcctggaagcagttaaaactttataaggtaaagcacaaatgagaacaatgcctgttccaactgaaaacactgtagagtcttgttgccgttcattaaccacaagggagctggcagaatccttaagtgaattctgactttgtattctctgaggggcactcattcttctgtaactcatttcttcaaaatatacatcaggcattagataatctcttatcgacacatttctttttattcagagtgaacagcagacttctctttttctacttactaaataccagctgtcaagggcctacttaaaaatgaaaggacttatcaccttgtgtaaatgacaagattaataatgtcttgggtttctgagaactttattctactcatagaccatgttagggcaggccaggagtgtgttccttcttatggtacagaatacacacacacttacatatacaaaacattatcccaaagtactcgcccagatcattctaactatcagtggaaaggcagatttcatttaagtctaaaaagtcaacttacataaattgtattaattgtaagtggaaaggcaggtctcatttaaatctaaaaagccaacttaggtaaattgtgtcttagtgactctctgattattaccaatatgttttcactatgaagatgtattagagtaaagctgttgtgtccagagaactactccataagtacccaaactttgtgaatctattcaaacatgagaactggccttgtctgaggtggatgggggtctatgggtaggtagccctggttctgatccaggcgaagggtatatgtggggtcaaaaggagacttatcaaaggatggagagagaggtgagaacagggtgagaccgaccaaacctaaagcaatgagttatgtccaccaatcaaaatggtttgtaaaagtaagacagctacaagactttaaaggaaagaatatctaaataactagttttctttaaaaaaaaaaaacaatatatcatgtagatgtttggtttacttcacattaaacacataggtgcttctgtatgtaaatgaaacctctgaataatgaaaaaaaaacatttttatgcttcctctctatattggtcctcttgaggacctagtctggaaagagatttccttaaccaactctctgcttttgctcctaccctgctctgcctttcagggccaattcttgctcctgaaagcaaccaaggataatttcaggttgttagaatgtaaatatttaagcattgtctgtctcagtaaaaatttccagctaaacaccgtgccacagccatagacctatgtagcattgtagagaaactttaagggaaaaataattagaatgttaaggataaagagacttgggtatctttaatggatctattattttatgacttgagtgtgactgtgactcaattgactagtgtctttggtatagcttctttcatagaggtaaattactgtagttaatacattttttcaggggtgaataaagatatcagtcagaagccacagctacttagaaattatggtttagcagtgatgtcaatgttttcagaatgtgcatctccaaaaacatcactgcaataattttggaagcatgaaatgaaagagacgtctaaaatcacaaaacttgagtctttctaggcagcactgacaagaaagaaagctgccacaaagctcattctgtctgaaaaaaaaaaaatctgaaatgaaataactcacagaaatctactggaaaatttaaactactcaggaaaatttccttaaataaaatgctggtagaaaggtatggggaaagtggtaactgggttgctttcatttttattttttctgatacaaaatagattacatcttttatcaactttacttaaaaaccaaaatccatgctgtttctagaacttcttcacccacaaagaaatcaaatacaggttatccagcatacaacattttgactgtccttctactatcaaactgtattataatcttagcaagcacatttattttctttaatatggctcctccatatcattaaaaactgatctgaattgattaaacttgatcttttaacattagaatttttaaaaatatgtatctttgaaaaagtaaagttcaatttatacactcttgttttgtcctgggtaatctttttatttctttgttagatgacctaattattaccatgactaacttgcaattgaaaacttcatctcaaattccgtttttttagagtccaggatttatacctgtcttgctctaaaattcacttgataaactttatccgtatctaaaaatcagagcaaagagaaacactttttataatttcttgtagagcgttccatttgcttttgtgttagacaggtgagttgatgtcattaatgcttaataattactcctataccagggtctctctctatagctaaatattaaataatacctcccacaatgggagtgttcattatgtgatgagttgtgcttattcaccatttggcagctcctattcctcatggaaaagagagcaaaaaacagacctagagaatctctttagtcagctcttttatcattgtacctagtccaacattcacatttcaaagctgtctagaattgctagttttaattggattttagaatattcatatgtgcttataggtgaatatgcttataatatatgcatacactatttgggtgtctcttcccttttgtcttgtcaattgggctaagagtgattgtatacatctacacgtatcatacaaatctgacttttacctctgactttcctcccttgttgtttatggatgaatttacttgaatttcacaattacattatttgatatgcattctgttagcatcttagatttctgtcagcataagagttaaaaattaccacttaagaaaaatgtgtgtctaatattgtccttgtctgttttcccagattaagtattttctctgattctttagtcaaaataagtaaacacgctattcattaagtcataaaactggcatattttcttttgaaaacaatggattttacaatgtatatttcaaaagcaactatggtaaaattataaatgcctactctaatgagtagcctaattcatagtgagaaacaggaaaacagtttccctttgcaatcaagattcccaatacgagtacatttattataaaacactacacacataaatattaaatgaaaaaatggctgcaaatagacttagattggctacaagtcccgttcttaaatcatcttttcacggattctacaacagttttatctgtctaaggaaatagcttccattgtcaataaatatgaacagcaaacaattattatgatatgattatattatttcatcttaaagctatcatttgaggtcctccagttccttttgtaaggagtataacattaattcactcacaatacctatgtatttctcacatctacagatagtaggtactcaaaaaatatctgttgttgatggcgacagtaactcatatgatagacggaatattttctgttcacaatcaatagctaatttaataatgttttcccttgtcaataattcctcttgttttcttatagcaaggagaaaaaacaattgattggtttattatttttgatatatgttgaagatttttaaatgatttccatttaaacctaattttacaatttactacctcttacaccgtttagtcagtaaaaattatctggtagctggtacgatgccaaagaataatctcataataatgaatgaaatagagtcttagaccaattgacagtagctttatttaagttttcaattggaaacatttaatttaaactattcttcttcttgatggtgatttcatagtagatttgccaagcaaccacttcaatatggtctttgaaacatatttgatttaggaaaccattgggttaagagaaataaatgattataacataattaaattctagctcaacaatgtttataaaacaaaaattaatgggctgaatttcttgttattttaggtattgtcatatgatattacaagattcataacctaattttattaagtgtaaaatatgtttcacgatattttcatgatctttatttcacagttattgttattaaagtcaacctcactgcatggtcctccataatgtcacaaagcagtttccagcagggttatttttaaactttttaacatataccaaaaaaagtattttaattaatctaaaagtaagtgttctcatttataattaggcaaatcaatataaaatgcataattagataagataacactgatactatgcatatacatttcaaataaaacctatataacatttcaagtatatcacttccaatttctgcataaattcacaagatgttcttgattagctcaataccttttatgaatgtacctactatgatagcaaagaaaaactgaacggtaggcagtaataatactcagtttttaaatcagtcacaccaagaaaactggtgcatttatgaaggatactagtacaaactgaatagactacccaaagaatgtaaagaaagtagtactaaatatgaatttgttctgcattttacttatatttgtgcattatctttcacaatatcaacaaacaggccacaagggtctactgcagcttactgttatttttattcttcaggctccagtgatacttttgtgctctcaaggaaagacaagaaaatctttacaacatacctgatcatttatctggcatgcaacaaggttgtgctgatcataacagccagcgaatctaatgtacttgagccagcttccaacatctggttgactggcatctatgcagaacttcacattgtaaaattcgtctaagatctggagggaagaagatgagaacaatcaattgccatattggcccactcattaaaataatcagttgtttgaaaatatttcattgaaatgtatattccttctttggatccttaaaaaaagtcagatcacaagcacattaatagaggggaaatgagaagttaccttgaaaatgacaacatactgcttttttaaaaaggaataaagcacttgcaatttgttacaaaaactgattaattggtttcaaaaatgcttattttcatatgcataaattagtgctaattttatccaatgtgatttttgcaaaaaataatattgaacagcgtatattaacataatatttctaaacattacagtcaatatttcatattcgtatagtctcatgtaagcatatattttcacatttttgcactttaatttaaaaacttccatctaaatttttttttcatggttagcatctcattaccatgaaacaattaaatcacactcttaattgaaggagataataagatttgtcttataggtgcttccaaacaaactaaagaaaaacaaattaaaataatgaattcggaaacactcatgcaaagtatggcaaactcaggttttagttaacacatgtcaacgcatgtttcaatattttgtctagtaagcaaaataaagctggctccttgtgaacaaataaaaaatatattaaaatactgtaatgaactgccatcattaggtatacttgtatcttgttatttttcatgaaattttacatttggcccatctaaatgttaatcattagttaggacacactaaacaaaaattgaagagggaaacttccatttttaagatcatgtgtacttaaaccaagctattctgattcactaacagcaataatgtcttaaacatcaatattaaaagctgtagagttgttgacctgatggtgaataactacaaaggatggtaatgttatgtcaatcagttaatacaaacgaggaagtttcctatcaaagactaagcaatatacctagaacaaaaattattgaattaaataactcctacagatctctgctgtatgcataaccacataaaagttaaaattaaactcttgagtactgagaccaaaagcaattttgcatagaattcaggcaatcacccaattgcagattcaagtcattaactcaccatatacttcaagaaaaacccagtgctccaagggctttagtcaagaagccctatgaataagcctttggccatgaggaaattgaagggcaataagtcgtcccaaaatttaaaaaagaaaaatcgaacataagatagggatattattaaacacacacacacacacacacacacacacacacacacacacacacacagagagaaatcaaactcttctttttcaaggatgcctcttcacactaacaacgacagaagtgtacacttaaacatcctttctattaagaggacaaattctaaaaatttgttatcaataaaattacaaactttaagatgtttcttcaactctcagtgctgagtaactcaaatggcaacttgagatttccccccatcccagatgttgagaaggtacataaataatagcaatgcacatttttaaatagtaaaaagttggagtttgttgctgggttttgttggtttgttcagtctgtttggtttctggttgatcttttgttgtttgtttccttgactggcaaaaaaaagaaaaaaaagaaaaaaagaaaaagaaaaggcagttctcctgacacaccaaagaaatatttaataaaggacatagaataaagccagtgaaatgcaatactaattccatttcatatttgcagagagacgtggaaaacttgttaatttcaaagtcaagaagcatccatccccttagctttcaagcataccctttcacaggggcagggagttaagtattacatacactgcacataaaaattgtaggtgtaattttattccgtgttaacattattagcattgccactgtcaacagcaaaattaatttttaaaaaggttcatttccaaagaatgtctttttactaatctgttatacgattattcaaagatttcaccatcatattaacattcttcctctcaatattcttgccccaagacaaaagcttagctttctccagaaacgtttgccccctgggtgaattattcacttttgatttgctagcagaactgcatttgtctcccaaatgtcttaatcgtgtcggaaatctcgaataaaataaagtaacgacacatcttcagtcatttcatataacacactcctgtgtttttaaaagctgtcaacctccaaagatagcttaaaaaaaaaccgtttaggtagactttagagaaaggccctttcaaaaaaccaacagcaaaaggaaaaaaaaaaaaatccccacaatctagccaaagggtccgaatgtgactttctcgcgaagcagcacacgatgttggacagcaaagctgttacttggcaaggtggaactcggccgagagcggctccaaagtcgcgtggccagtgccaggaattcagattttggcaaccgcaccttgtgcgtccccgaaaccgacggacagagacacacggagggaggggaaggaggagaagagcgcaaggaaaagaggccgacaagccggcagagaaacccaccgaaggccggacgacccaccccggagacgtgtccagaccgcaccgtttcgcaggaggaacaaggaaatcgcccggcttagcaacgtagataagcagcagggctccgcgagactgcgggcgaggaggaaagaaggctgggggcggggggcgcccgtagaaacggtgccccggcaggaaactgtccgaagtgacaaactttcacatcgcccagactttttttccttttaaagtgaggagttctcttacctttagatttctatggcctcaactcagcaataataggcattcacagaagaatcaaaataaacaaaataaaataatcagcagcccccaacgctcctgcacgaaaatcctttcaaacgatcccgagcaacatttagagatgtttaaaaataataataataattttttaaaagcctcgcgtctcgatttccaaatgggtctctgacaactttgtccgtctctaggatctgctctccaggaccacgcgtttcggatttattgtccgccaacagtgtatttttaatacaagaaatgaagtcttctttcgtctgggtgacccgggtttggtgtgttttggctttttcccccttcctaaatgagctcggagctattccttctggttcacatcacctccctcttttctcactttctcttgctcttatcagcccgatgtgtaatgaaagttatctgaaacccactaaaacttctacttctccttcccagttccaatgggggaaaacaagcaggaggaggagagtttgaaaaggtggggggcctggggaggcgaggggagctctatccccctttcagatcctccgcagcgccttcgcgggtcctggaccctcacgggatcgtcccctttcgcaactccaagctcagccgccgggtttctatttcatgaactgtctctttaaagaggatctgctcggccatccagaaagaacccggggcgagggagaaagggagctatctcccgccgcccagagtgatctgatcggaagccagacgggctcctcttttaaatttttaaagtgacagcagcctcctctggcgggagaggtcacaaaaaggtcgccaagacccaagtcctatagggacagactgattatggatgcaccatcccccttaaacatgtagatttctccgggtaaacaaccaatggggagatctcgccaggcaggatttctttccccagggaaatagcctccgtttcgatgtcttgaaagcacaagtgtggtgtgtgtgtgtgtgtgtgcgcgcgagtgtgtgtgtgcatgtgtgtgtgtgagagagagagagatgggggatgggagggatggggaagggtagagaagtgctttcaggggtgtgagggtgtgtgcaccgaggcaggagggggcgggggtaggggggagaggtagtgctggagtggggaggataaagcttagggtatagggacgctagttcagactaaatataaatagtttagaaattctcagaaaacagcaacctcaagagtgaaaagttgacatgtacatttccagttttctgctaagcattaaaaaaaatttttttaattgaaactcatactctaatttattcccttcattcttgtagctaggtcagaggaagggcgtgcaaaattttcaaaccatatttttctttaaagatattttaaaatctgaaaaattattggcatataacccgcccaaacagcatattatgggtttagagagattgatgactgtctggtgagtctttgccattttctttgatacattaattaaaacaccttgaacgccaaaacgtgcaataagcaatttgacgactcagattatttttgaacgtttaacatcataaatgctgcttttagtaatcggtactatcctatgtttaataactttctaatataccttgggtacatttaaaccaatacattgtagaaaagacattggaagaaagaatacaggggatacatagcaaaacaaaagggtctacagatttattcatggccaactttgtaagatttagtaaatcccactggctaaatggaagtaaacgcgtttttatcacaaaactccattcataaaaacaaatggacaaaatccaactccccagctcaacaatggaaagttaagcaaagtaagcgagtctagggacacttgcgggggagaggtggggcaagaggggctggaaagtgtgctgacggttaaactttagctgcaaacgggataacacaagtgccacccactttttgttttctccaagtgcaaataaacgtgtaaatccagtagaactatattttcccaaaatattgatttaaaaacaaaaatagtagcaaaagggagggattgggggagagaaaatgacaagaggtggtgactaatttgtttcggtggcctgttatctgtgacattgaactgttatttcagataatggccattgtttgagagaaaatcgcacagcagtggtaggtaggacaggaaaaatcctttgtaaataacctaaaacccggtcagatattcccgtagagttgggcgcttgagaacctttaagagctcctggttcgtggccattgatttcctgccctccctcaacttgcccattgtcggagctttcttttttttttttttttttttaatttagccataaattggaccggctcgagctatgagctgttctattttcttcctgtcaggatgagggatttgttttatgatgcattgtgtattaaatacaagtaatctggggaaccgattgcttcagacagtgcggcctgatcagggggtctgggagctcagcgccccaaccctgcggcccccacctccttgccctttacaaaactgctttcaaaacgaggaaacgtcggtaggaaaacaaaaggtcgtctggaatcattggcaggtcctggctaaattaggatttcgtggaaagggcctccgagttttttcccctatattggcttcgggtggggggaggcggagcgactttcaaggtctggatacttgcaggtacggcaggacgccggtagatggcattgcgctccgaaataaagcgcagcgccggcggctccagccacccaggtgaacccgcctctgcccgccaggcgccggcaacacagctctgccttccgcctcgcccgccgttccgcgtccttccgagctacgagaggaaggcacactgcagtccaggcatgtagacatcagcctgagagaaggctattcctacgtctgagcttctcttccccaaatacaaccaagagtgaacgcttaccctccgagaccttggaagatgtacctagaagaatggagaattcattgcatcatcattattattatattaatatcatcattatcgtcatcatcagtcttgttctccactgaataaattgtgaaaaagactaaaggaaatcatcagaaggacctgggcaaaggaagctaacaaaacactaaatcttaatctctctttctctctctctgtgtgtgtgtgtgtgtgtgtgtgtgtgtgtgtgtgtgtgtgtctgtctgtctgtctgtctgtctgtctctccctcccctctcccccaccccatcccactccctttctcctttaggtatataacaataacttcatgtaaaggcagagtcatctcactttttcttcacacaacttaaagtttaaagatagggttctgaaatcccacagtagttagactggccttgtttctcatgaaagggtcttcttgctatttaaataagaattatttagaagacctgatccatcttccccaataagtgaatgaaacaggaaagaaggttagaggaaaaggattttgcaaggggcttgcttcttcccctgttagcttgctttccatcagaaggtttctaaaacaataaataaatacaaggagccaaataccatcaccaattccctttattccttgggatttctggtgaaatctgtttacagtagttcccagttacaaattaatctgcaaaagccgctgtctgctcagcagtaatcagtaacatgcgtgttctgcagtgtttagcactgcccttgaaatgggctattaaaaataatggttttactgtaatctcaaaccagctttaatttgcaaacatgtatcaggacagatgatctaaatattaaggggatggagtaggagaacaaactaaaacaaatgtatagcttcggggaaagaaaaaaatggaatgattcatcagtgatgtttaaaaagagaaccagattttaaaaacatttttccagaaggaatgattattttttctttcttgatctgttaattgttgtttaccaggaaaagggcattggaaaaatatgagggttgagtgtgggctgatagattttctaggagttgtaaagatccccctttggctgatggcagggctggggtgggagaggttaatgtgttttcttcctggtttgaaaagggcataaaccctcctcaggccccttccttccttccccagctgtgtggattgcagaatctttaaaaagcccaaagatttccaataaggccactggctctgccttcattgtgtaactgtttatttaaaataagtcaatatattagttaaagcagtaagaagttagtgctccagtattcaagtgattcccacaagactgtaaactgatgcctcttttaagccttaaacttcatggtcgtcccagaagtaaaagttctgctaatggagaccctatgggcatggtacattccagcacatcattaaaggaaagaaaagcagtccagccaaagccagatgaaatgactgcactgtccacttttaataggcttcctgtggacaaacagcactgtaacactctgcagaggacaatatttaaaaacaagacaacttgctggcagttttcaataccgtaaagttaataaagtatgttcccattcaccctgacattatgtttttagtttatagaggaaggcactttataacctcagtctaaattcccttaattctgcagctttgggtttcttgaggtggctaaatatacactaaactccaagcctaacatctttgttttaactctatttttttgtagcttttcaagaacgtacatgtgcatttttacatttctcaagtggagttttattcatggagattctgttaaatcctgtttcatacagttcatgtcaagaagcatgaaataatctgagaaattgacatttggctgaacaataagtgcctgctaattaaattagcttcgtgtatagatattgatgtgtgtttaaaaagaaaatcaatgcttccttttccatgtcagaataggattttgtaaaatcttacctaacctaactgacacaaagataagaaataatgtaagtatgtcttttaggactcaagagacttcccactgattcatatataaatatttctcccaatttgtctttctcctactcctctaaattctctaccacccacaatttcttttcccaaatctttttatttaatagagtaaactttgtaatgaagcatgacctttaggcaagataaactagatcagaaagccatgaaatctaaggtgatattctgtttaattttaataatttctgttttttaatttaataagtattttgcaagctttgttctctaagcatgaatgtgaattctgtgatgctttgatcagacagatccagtgaaacagtccagcacaatacaaatttaccaacaaaaatgctgtgactgtccgtagccccacacacatatcacaactgcactgaagagagattactggtgactcttggtggactctgcctttttttattttttttaaattattattttttttatctattggggtgtgctgttagaaaagaggaaattaaagataaaacaaatttaaataaaaaatttcccttggtctggaaatgggcccgactgaaagcatgttaatctccacctcagtaatttggttctccaggagaagacagaagccctgctgctgtgccctgcacttcataaatcacatctttatgtggacaaggtcagggcacctaacagctcagacatgggcctttgcagtggctcgaggattcaggcatgtttactctcctattcggctctccgaggagtagtccagcacgcttctaattacttttgattattttcatttgctggggtcagtctggcttgccaggactgctggagggttgatttcctacaaatcttgatgtctttgtaggacggcactgtgtgcgttcagaattagcaccccgttattgtccctacagcatgggatccttcataaatagacatggtgataacaaaagtttccccagtgaaccattacctacttcctttcttattaattaactatacaagcataatcacctagctgatctttctccaaaatgccaaagattttaacagtttaatattttatagtatatttggccagaatgagagcagatttcttttttgcttctattttaaaatatatttagtaacaactagcagctctttggaaactaagatgaagtactttgctgaaacaaccgctctggtgaataaattattatactcaaagttttattttttaaactccagttaaggttgccatatttaaaatattttttgctggactattttgatgtgtttcagtcctaagctatgatgctgagtggttaatgcacagcaacaaatttataccaagtttaaatgaaaatattatgataaaataaaaatgttaataaaatactgtaaaactttggtagcaaaatagagacaatagagaaatatttcccaaaagtagggatgtttaactctttgatgtgtatttattacaagatatattcaagaaataaatgatgaaaaaataaatacaaaaactgagacagtcacaaaaaatgcataacatatcaatctggttgttcagacaactggttgttttatatcactaggaaaaatttactattatctttttattttataaaagataactttgcttacgattatcattagtctcaaaaggtgaaatccctcattctttttaacttcggactaaattagtgaggtagtaagtgcttttggaaaaaacctcaactctataaggaattcatttttcattattttattaattttaattaattcaatctttcaatatagtatttagcacattatgcaataactccaggatcagattcttccctcgagctttagatacaccatctaagagtgcttttagactcataatcttgtggggaaagtttgttggaagcttgattttcctcctctctccacgcctagctgtgtacctttgggtaagtcacttaacctttgagttggtttccatgacagtttcataatatcagactattacgagtgttgggaaaataaattgggtaacgtgagtgtgaactgccctgagttcatgggaacaggtcaaaatactataagtttcacagtatttgtgtttgtgtaacgggttacagtaaacttacatacatgcacaatgaggaagatagtctggcctatactttggggaacagcaaagtgtaagtagttttgtttcctctttcttccattccagtgtcagttgccctaatccttaccctgaccttggaagggaagaattttaagaaaagtgttttttttctctcaagctgtgctacccatgaagatgtccgtctctgtctggcttgcagctgagtttgttctgttctacccactgtgttctctgccagtcagtaagagagagtattctgcagcaaaggtggaataccattgagttccagagccctaaaaacgagggtaggaacacacacacacacatcttggactagttttaggtcaatatttgttaccaaggccaggaaatttattctctacaatgtctcctggtagacagactttaagtaccaagagggcaggaattgggtctatcttttttgcccctgttgcccagagtctaccataatgcatgacatcaagtatttagtagatgtttgttgaaaaaaaaatggatcaggtccttccttgacttccattctcacctagtttgaatgcctaatttggatgcctgttacctctagtctgaattattgcaatgatctcctgccagatcctctgaccaccattcactctcccaccagtttaaagtccttgatgttaatcctctcaaccatctgctgttacttattcccttgctcacagtttttcagtgagttccgattgcctaacaattcagtataaattcattccattttttttgagaattcaatgaggcaatgtaggtaaatcacttagaatcatgaagaggatataggatatagtcaatagaaaatagctattattattggtattgctattataattttaattgctatcattattattgctcagcctataatttattttgccttggttatcatagataaaatcttatctatacttctaaaccaaccattttttatgtctgctgatttttaccacccaggcttgacctttccatccttcaacccaaattatctgtgcttctctcctggtttatagccagttcttccttacttacaggtgtgtctttaatgctcttgtcctcctaaggaccattgtaagatttttaaggacggaatcaagttttgttcctactgatatcttcaataacagctttccatcataaactaaactgtctttgagactttttgtaagaataaattaattatggctaaatgtatggggaattactttatttacatccaagcaaagttggttacttaacactattcccccttaggaatcagttgatgcagtgatgattctttttcagggatttagaaaggaattcctaccactgctgcctctccagatagcacaatattgccatacttgccttaccccatgtttccatttctttaccatctctctcctttctctgggcacaaatcctggacagtatcttggactcctctccttcccttgtccccaataaatagtcattggttcagttggtctgttaaactgtttctacagggtgctcattttcccactggcactggtctagtgaaggctattgtccttttaggcctgagtttttgtggcatttttacaccaaacattagtcttcctaaaataacaaagttataacaatgctttgctttacctaaaaacaaaaggtaaagagcaaaaaacagaagaaaaaccgcactaacaaaaactccaatggatcccaatttgctagaaaataaagcccctaatccaaaatgcaatctcctcttttacaatttgatgtcaaatttatcgtctttctaggcccatttcctgcttgtttcctctacacaaatctttagcactggttaacaactggaaatatgaatagaagctcttggcccttcaactgtgctgaggtaggtccttcacttctcttacctctgacactgacagcgttcaggagatgaaacaatagatcaagtaggcaaagtgatagttccattcatcaagctcctgcaaagccttccaggccctctttcttgaaatttttacagtatgtaatattaaaagcattcactaattagtcattattcttaaaatagtttgggatatttctgtgatcagccaatctacctgtatactgtttgatggcaggaaacatccttcacaccagcattttctaattggttattagaaaagttattatcagatattccctggaaattggctctgaggtcaactcagagagctaacttcacccaatggataaagatagctccctcttggagcttcacaatgagcaccaatgtgctaaatacacttaagtctaaaactctaaaagtctaggaaatcctttagtaaagagacctatttggcttattcgaccaggcatcatcgtaggtaattaaacttatgtgaaagcctctctcctcttccactggaacacctaaggaaaacaattttgtaaataaagttttatattactttgtttcagaaaagcataaatattccccatacatatatttttctatcaactgactgttctcaactcttgataaaaaaaagtccccacaaaacagtcataaataaataaagacaaaatgaagcttccacattttattcaaattgaaagcatttggaaagtctataaagatcacaaagaaagtaggttatcagtaaactctagccaatcgatcctttgcctgtaaactattacaattgtatttgagtacacggcctgagaaccttccaaaggaatatatacaatctcatttcaagatcaacccacttcttcctatcctcctccattaaaagtccttccaaagcagagatttttaccatgggcatattcacatgcaatgttttatattatttagacttttcttaataagatttggcattatctagatatgcatttccctaggagaaagaaaagcagcagtgcaatctccatctaaggatgcctgaattaaacctttaagaattcaccttttttccagtttttgatattagattcatgtgttatgcctgcccatgactgtctaaccacgaaactaactggacattaaatcagatggcatacaaaattacaggaatttgatctttagataaaccacaaaccttgatgaactaatgttgttccagatgaattaactcatcctgagaaacagaacatttcataggagcgaccacacagtcttctctgcaaagaacactaatggctgtgattaatttgtgttctattgaacgtgcttgcttctattgaaagtacacctaaaaaggtgtatactaaaggaaggaagaaggcttagtcaggcaattctggcctcagaataattgccccaccccaaatctctgatggtggatgctgcatattacttatacttggttatgatgtctgttacagcgttaagaaacaatgaatgtgttaagtcattatcaatgatttcatgaaacatttatcctttctctacattggaaatcctaaaatttcatttcactatttcaatgactgtagccaaacacttaaaaaataaagtaacaacactacagagccagaaaagtatgtttagtttataatccatttagtgagtgtcacatcttatgatacatatcaaatggtaaaatgtcaaaatattccaatagcaattaaagtaccaatacaatctctatatcattgtgaaaatatggacattgatttcaactgtagctttgaaaatatctttctgtaaatgttgttgagtaaattcttcaacttcaaataaaatcttaatatagcctgtctatagaatccagaattaagtactggtcaacttccaagaagcagattctcaaaggtatttgtgttttctatgtagttcttggctggaaaacaaatccaagtttgctaacacagtgccctacaactagaagggggggatgccagaagggacatgaatggaaatacttaaagaggaaagaaaaatatgcaccctgattcacacataatttctctccacatataatctggactgccaatttataaataaaccatagagctggatcatgatgtggagaacattgaaatgatgagcctaggaaggtgattgaaatgactacaggtttaacattttaaactcatacttttgtctaatattacattgtgccttatacaattttatattcctccaccccacatccattctacaagagctggcgaggttcaaaatttctcaaaaaaagtgttgattaattaaatttaaatgactcactaagtgttttagctacgtaacttttaaaaaatgtggtggtggttgtcgtccctggagaaattaccataaaactgtttatcattgtccgtatataatctccttggtaatcagtgttggaagatttcaagaaggtcattataaaagtcttcataaaatatattttgctgaattttaatcttggaaaacacagtgaagtcacaacatatacacgttcaagacttacaactattacaaacagagggaaacggaaggcagggagtatggatgagagagaaagagggagggagaatgaatgagcctttacccaggaaagagcatgagacggaaacacgaatcatctgtttcctcaaaaggaatcagtgttcaaatgccttttgtactatgagtatcgtgttccatcaagtgtgactctcgggtttaaagatgtgtatttttcacaccatgcatcctctgaatgcaaatataccacttcctctggtgctcggccgaagccacggtggtccattccaacactggatggttcaagagcagagctgagcagaggaaaaatttgattatacttgattttcaattacctgctcactgtagaacctaagctctcagtaagatgtaaattcactgaatttggtttcatttatgaaaaatattccattgcaatgacaagataagtaattgagacagtgtgtttttatgcgtagtggggtgcagaccagcacttctctaattattctcgcccccaaaattttttgtgtgtggtccaggtgataaccgaggttcatggctctcataattcaactctcgaatcacccgtacctaggaagaagtgccagtcatctgttttcacaaacttcctgtctcccatggcctttcacagggaaggtgatgggctgaacatggtaaactgccataatgaggtaggaagttttcttcctagggcccagtaaactacaagcttcctctcagcaaaaaggaaaacacttggcctcatgagcaatcagtttcatccacagtttcctgctagaccatagccttctgatgttacacccttgagggagtctgcttctagttatgtaatagtgagaaagttgcttcaacttcttcagcctctcttttagtatctctaaaattgcaggccaggcatgttcatgcctgtaatcattccaggactctgggacgccaaggtgggcagatcacgaggtcaggagtttgagacgagcctgaccaacatagtgaaaccctgtctctactaaaaatacaaaaaattagctgggcatggtggtgggcacctgtaatcccagctgcttgggaggctgaggcaggagaattgcttgaacccgggaggcagaagttgcggcgagccaagatcacgccactgcatccagcccgggcaacagtgcgagattccgtctcaaaaaaataaataaataaaattgcaataatgggacttctaagaagttattagggttaaacaattgaggtgaagtatataaagcacttagtgtaatatctggtaaatagagactcataaagaagtacagtacttggagagatagcataaatccaaataaaaattttaaaaaagaagtttaggatagtgactaacaacacagaatctgcagtggggcagcctggattcaaatcacagcttcgctatgtgcttggggtgtgacatatgtaaagttacttatcagcttggtttcctcctttgtaaaatgagtataatgataaaaagtatctcatagggctattgagaggatgaaatgaggtaatccatgcacagcacttaatttagtgtctagcacatactaagcacctaataagcatgagctatttttaaatggagttctaactcaataaaatcgttggtacttcctatgcaaatgccctctgtggttttttttgttggtggtggatttttatatagccatctttatatcaaaagagaaacaaatattttgtccctttaatttattttctggtcactcaggcagcaatttgcttctgagaaacagagatggaaacatatagagccagagaagaataaccaaaataagtgataggaatacaaattcataatggtgtctaaacactaagccaggaattgcaatccgaatggggaaaaacattttctgagaaaggatttttttggagacagataaaaaaaaaatgaagaaaaataagaatcttcaaaattacgctagaaatgatatgtgttttttaaaataaaccttgaacagaaattatgtttaaactacattttcctcaatatttgaagtaagctaaatgaataagatctagtacttgatagcacaacagggtgactacagggtgtaacttttagttatttttaaatgtacaataatatattgtataataatatattagttattttaaatatatattatatatttaacaataatatattagttattttaaaatgtacaatatattattgtacaatatattattgtacattttaaaataactaaaataatatattgtacattttgaaataactaaaagagtataactgagttgtttgtaaaacaaaaaaaggctgaatgcttgaagttattgataccctcatttaacctgatgatattattatgcattatatgcctggatcaaaatatctcatgtaccccataaatacatacacctgctatgtacccacaaaaattaaaaattaaaaatgttttaaaaatatacatttcttcagaatgtggtaaaaagaagacaaaacattcacagaaaaggaaggacaatatacaagataaaacattagtgtgaatccagaggacctcagtagacgctgttcaattttgggtgcaaaaattggttctgctggctgggagtttatgttgcaaagcaggacaatgagttcaacacgtaaaccaacttagttcaatttgctccacaagtatttatgaggaatcttctatatcctggcacatcatttgacatttagtgtacattgatgattaagtcatggtcaccacctttaagtagctttaaaatccaatgaaaaaaatctattgtgttggccattggttacataccacaccctatagttagtcataagggaactgaaccatgcatggatcctggggaatcattgccactactgggaagaccaaccctaatataagtgctggcaatggcagctgagcctcagcatccttatatacagcaagagaggcacagtcttatttttgcattcttaccttgacactgccatcaaaaggggtctgacctggatatttacaaattccctgagccaacagttcagaatttagaggatatggacagacctaaaagaagacaaaagacttttttttcctgattaaaaaaaatactggtcacagattaaagacaaaccattcactcatttatcctctccatgttccaggtaccacgttgatggtaaagagagaagataaatatactgaatacccatctgtgatggttttaaaatatattaagaaattttaaattttctctccccttcttcaaaaagtggtctaattctcctcatgttgaatataagctgagcttagtgacacacttccgataaacagaatgaggagaaagggatgctatgtgagttttgaaatttgattataaaaaagaagagtctctctctctctctctctccctgtcattcatgttctgtggatatgatgcagcctgtagaaaggcctatgcggggaacaattaggatgtgccagctatgtgaaagagtggccttggaaaacaaattatccagcctcagtcccatttttaggtgactgaagctgccattttccctgtgacctgatgagaccctggaccacaactgcccagctagctgagccacccctgaattcctaaaccatagaaactgagaacactaaatgtttactgttgttttcaaccattaagttttgggataatttgtggggcagcaatagataccaagcacaccagccacagctctttggtggatacggagaattcagttgcctgatgtcctcagaccatcagagaatagctctgggatatttccctggccccacagcactctctctgattccttggcttttgactcacaggttgaaaattaccaaaccaaacatgctgcaggataaggtttagaaggcagaggaaacaaaaaattaatattaaaccattgtccctgctgttaagtcccatgcaatctatttagagagacaagactaagctacttgaaagaacggcaaatagtacaagactgtacgtcattaagtactaaattatgtcattcgaatgttaagtgctgcagagattcaaacagaagggagatggataaaggatggcatggtaggggaagcttcatgaaagaggtgagacctgctgtcattcaaaagataggcaaaagcggaaaataatattactgggagcttaggcgaaacatattttcaacgttcatttaactgctttgcaaaaaacccagcatactattgttcattaggtgtgtaaaatcatcctcacgtaatcatcctcacatattttaaaaatatagattgtagtaggttaggtatgtttatcttcatatgtgtgttccaaacagatagattaattttccgatggattccaatataccagacagtttcatactcagtgctgggtgaatctgtcagaataaattaaaggaaaatttagaaataattcttctggtaaaatatgaaagcagtaagagtaattctttttttaatctaataattactaacacactaaaggttcatatccaggcataacgttttgtaggcaaactagaaatattttatttcagataatgggtcttcctattttgtttaacaaccaaggactttatatctacattatattcaactcatttgcaataatgataataataataataaaaagcacaaaacacttttaaatcataagcataatgcctaaatatatactattcagtgcagttttctgtgctgtagttacttaaaaataggcccctggatttaacttctttgtaagtaatttggctaagattggatatgtaggcaaaagatatccattcattttttttcttttaaagcaagtgtacttaaatattttattactaacattagtcagtcgtgttaatttcactcatgtactccttctttcagaaacaaatcagacataatccttgccaaattctcatctttgaaaactccactggcaacaatgtggcaagtgtattggggtaggggcagggcaagtggatcctgggtgaccaattagcaagtcattgaagtaatagaagtaatagacactggcaagatgataaaaaatagtaattataatacaatctttattaagtgcctattctatgtagaaagcttagtatacatcatttcatgtaacaactcactgactataaggtgattattatccttgttttacagatgacaaaactgaactcaataagattgagtatagaagtagcccaaagtcacccaactggtaggtattaaaaatgggattcaaaccctgatcaatctgcctgtatattctgccatgttcttttccaaggctacattatttcagacataatgacctgaaagactggtctgttaagatgccaaagatactatgtccttggtaattgggagttggcatttaaggtcactccgagccaaccactgactgacagggactcttaggacccctaatctcagtttagtaataaacattagattaataaaagaaacaccactgggggtattttcaagaccaaaatatactctggggacatcagggaatctatgctgtgtactagtaattaaatggaggccagcgaagcaacatgattttgccaaggctcaatcttaatcaaagtaagaacaaatttgaaccaatgtttggtttgtggcatcatgctattttttcaattagcttctcattgattaaatatatttaaattatagttgatatggtttggctctgtgtcccctcctaaatctcatcttgtagttcccataattctcacatgttgtgggagggacccagtgggagatgattgaattatgagggtgggtctgtcctgcaccatcctcatgacagtgaatgagtttcacgagatctgatagtttttaaaacaggagtttccctgcacaagctctctctctgcctgctgccatccacataagatgtgacttgctcctccttgccttccaccctgttgtgaggcctccctagctatgtggaatggtatgtctaataaacctctttcttttgtaaattgcccagtcttgggtatatctttatcagcggcatgaaaaccgactaatacaacagtcttttaggaaaagatacacgcgaaaaggaattcagtacttaatacagggagagaggcacttcttggaagtaaaattttgatctactaaggttctcaaaagtgaccctacaaaaaaatcatctatcttcatcttacatttttcacttagatttccctaaaaacacaaaggtaaaaataaaagaaggcaaaataattttttttgtccccagctatgaatctatgtcataaaatgtatgctaataaaaacaattatatttgattttaacattatgtcattaaaccataattatgtctcatagctcagggaaggtcatttggggttgttagtggtggtttcctcctaaatctagcatatctgtccttgctatttgtttccttatctgattatttacactattttaaacttccttgtacttttatcatcaaaaagcacttgtggtctgcatcctgggtggatgacactgacctcatgtcatattccttgtctgagctacattcctagtaaagttccctgacaaaagttttgtctacatagtagtcaacataggttttcacaggaaataaattggtttatgaaagtgagtcttaaggtgggaattggttcctctgtttcagtacatcttttgaaaacgcttagtgaaagttcttaaatattttggtgaagacacatatagatacatgtcatcggaaagatctaagatttcacctcttaaaactattaatagaagtaaactgtttactgcaccatttgacaaacatttccaaaccgtaactaagcttaagttgagcattcattctagtgaaaattaacatgaaaatgcactaagaaaatgaagttgtaaaattgattgatttcagtgacaaaaggagatgcaatataaccaaacattgcaattgtaccggatggtcaagccatctatagcataccagaagtgtgtaattagtctatgtttttcatcactaggaaaaaagtatgtggttttagagatcatgtttaaagcacctacagaacccaacattgtcatgctaaatacaagagatctaaagatctgctgttacacatctattacatttagtgagctgtccccctggcttttttgaagtgctgtatacacgatcttgcaaggcaaaacactttatgtaccatacgaaatttgaggcataatgttaaatgttcacaagataagctaacaaaactgtatgctagtgacttttttatttccttgttttatgtcctttaagtactttaaggaaagataaacaagaaggtagaggaataaaatgtggctcttccttctacatttttcactctctttcctaaattaaattataactgctgatttgcacccaaggaaagaatcatgttaaaatatgctgggttatttttttaaaaaatgtttagatagcagctttcaaaacatagctaagtaaaatgtgttttgagatggaaaacatttggtctttttttcagctttcaacagcttaagtgaagggatttttaatgttcccaaacagctgggtcatactatgtctatcatgaattccactcttcactgaaggatcccacctccctaactgtagggagaaattctctttttaattcctgttctttcacttgttcatcttaatagcttcccattagtatcacaggtttttcataggtaacgcttgcagcagcggttgctgacagaatttattcttgaatgaaacataaaacttttcttcaaaaaatgccaatggctttctatttattgtgtggtggctgtagaaaacaacaggttaatgtacactggaacaataataataacagcatggtagggaagcggggagtgcgttgcttattttcaggactctagccttctcaaaggtgctaattactgagcattccagggctcattatctgaattgtctaaatttttatcactcttttaacgtcactccgaacaaatgcacaagagtttttcaaaacaaattaatatttttaaattattttcaaatccttcccaggtaaaaatgtgcatgataatacatctatgtacttatttatgtgactataagcaaggtaatgaagagggagtgaatagcaatcatgcaatatgtcaaatcaatataaaaccaaaaataatccatgtaaaaacagagacagaatattgttatttactgcaaatgtacgagttaaattgcatcttacatttaacaataggtatactgttttatatccaaaagagtaaactaagagttcaaacatttgcatgcactaaatatgcaaactacaaaaataaactgtgttcataaatgtacataattgtgtaaactgcttggcaaaaaaataacaaaaatgttattgtctatttttataattattgattgattgagacaggattgggattacagccgtaagccactgcacttggccctttttttattacgtttcttcaaattaaactacttggttctttataaattattgtattatgttatcttcatttggctgagagagatgagtttaaagaattgtagctgtgagatcagtaaatttgccagagacaggctggagtccagtggtacaatcatggcatactgatgccttaactttccaggctcaagcaatcctctcacctcagcctcccaagtagccgaaaccacaggtgcatgctaccgtgtctggctaatttttaaaaaaatttttgtagagacggggtctcaccatgttgcctaggttgttatttattgtttgtttcatagtggctttcacttttttctgcatctatttgtttctcatttagaagttccattagatggaaattcccagctgcatattcaccccctgtgccttctcctcctcacataactcctccagttggactgcaagccattgggctttccagccttttctatgtggtcagccattgctatgggctaaggatgggcagggagtggagaaatagagcattactccaagatgtgtgtgattggtcaaggaactcaaggtcccgcatgatggaagaaaagacaccatggtatttattatctaccatgcggttctacacaataaacaactcccaatatgtagatgattcagatgattaacagtagtttaaattacttttgcaaatcctctataattgcttttcaccataaccaccatcttctaactcctcctccataaaaagtcaatgtcttcttggataattgaaagtatactttacagatatgtgatctatacttctatgaatagacatgtaaccctaatatagaaaaattgattgtgtatgtttgacatatacacatacacagacactcacacacacacacaaacacacacacacagcttcaaaattgcttttaataaaacatactagaatctacacaaatctacatctatactctgaatgacttttgagtacttgtcctttcgggttgcctatttcaattaacagtgttagtatccacccagtgactgactctgattcggtaaaagaatatatctttaaaacattcttctacatccatgagcaatgagagggaatagcagcttgtcacatgtaaacatggcctgggtttaaaaagacgtgaaaacaattgcaattctattgttaaaaaatttgatcattttttagaagaaattttaaaactagttttagacttttcataatcagttttatttagaaatgctttagattgtggagataatgccaatagttttttaccttacagtataatctgttttttgttgtgttttttgtttgtttatttgtttttagagacagggtctcgcttagttgctcaggctggactcaagtgatccccttgcttcagtctcccaaagttctgggattacaggcatgagtcaccacacttggcctgcttttttttttttttttttggttccatttcttcaaattaaactacttggttctttattaaattatggtattatgttatcttcatttggctgagagagatgagtttaaagaattgtagctttgaaatcaataaattttgccagtttttacattaaaatcctgttaggtcagatttgttaatatcaattgcataatgattagttatgggcaaatcaaaaagttataaatacacttcttatacagaattaaaagttctatatgactctacatgtaatctttttttaaaaaagaaaaactgtcttggagagatcattagttcactttgttagattcttggtccttgaaccttatagtcagagggggctataaataaatagtatgttagttttcattgagggaactcttctggttggaaccagacaattggcaaatctcaaaaaaaagttggaatactaggggaaaaatgcaaatttgtatacaaaagtacattatttaacataaagaaaaactcaaagaaaataaaatcaaaacatttataatttagaataggttattatagataaaattatctataaaatgatagagaaaatttagataaaaatagaatagattgttatagataaaatatcttcatataatatagataaaatttagacatattattaatagaaaaatatgcaggcaaaaataaaattatatttgctcaggttttggtttccactttttaaaaagttataggtaatgtttcctcttcatctagcactagttcactccataaacacatactaaattaaatttaacagtgtgcattacctgaggaaaatggctttcaaaaagaatttgttttctacgttatcatttagtgtagggaaaataattacacatgatttttagcagaaacacaatacttaatatcatattctgggtcacaggtcaaacctttccctgggtcagtaatactaagtagaagaaagacttgaaactatgataagaaaatcagtcttcgcagttatcaaaataagttaaattaacctcattacttcaaactgaaataatcaatatgatatgacaattatttatgaatgtaaatgatggtgattttactttcaaacatgttctgctatgttctttgcagacattccagaatccaggtggcatactttctctcatattactaaatgtttgctctgatctcaggagtgttaatacaaataaaaatattgacattttttctcacttattcagtacccatggaaaagaaacctaagtgtcatccaaaactcagtacctcttgtacttaaaaaaaaccttcagaatataattccaaaatgtgaaataatgtgcaccagatagtgagagcaagaagtaacctttagtttccctgaactacttcaacttcctggttaaccatcttatcagaagtttattttaataaacagagagggtcagcaagatactctgttctattcaattctatatgagagcagttctacagttctacttttttttttttttcccatgggaaagaagcaaataccagccagccaaaatacaaaggcctagatgatatcttactactggcctaattaagtaatattttaggaaaattatatttaggcatttatgtagttcctactggaaatgaaatccccagactatcacaaaagctatttcatatacatgcctacaaactctcttttgatcaaaccactctatttttacctctgtggatttagatgtttattttaatcattaaaactgtctgttctaaatcagaccttaaaagtcaaagctagtccaggcgtggtggctcacacctgtaatcccagcactttgggaggccaaggcgggtggatcacgaggtcaagagatcgagaccatcctggccaacatggtgaaaccccatctctactaaaaatacaaatattagctgggtgtggtggcgcatgtagtcccagctacttgggaggctgaggcaggagaatcccctgaacccgggaggcggaggttgcagtgagccaagatcgcaccactgcactccagcccagcgacagagcaagactctgtcaaaaaaaaaaaaaaaaaaaaaaaaatcaaagctaagcgtctgcattctctcagaagcaaccctcgaattacattgtttcccaatgtacttaattgtagcaagtcagatgaagtcacagctcaaatgtatatacactttcgtggatgctgaatatgtgtacttggccaatattttttttccattcaacacaaagtggctagaactatgttttttttctctagtctacattatgagccagtttctctaattctgggcaacattccacaaagcttcacagggaatccccacagtaatttacataggattgggagaactaggtgttccctcaaataaaaatatcagctggggagcttttccccttgacactgttgaactcaacagccgaaaaggaattctattaacccatttaaaagtgaacttattgatggttttgaggttctacccataatgtcctttttcacaccatagacaatttgattctcaattttgaattctaaattctaaatccactgggcagtgtttcatttatacattacagaacagccttccatatagatatgataaaaccccaaaatggatattctgctttcaatgttgctaaattaataggaagatttcaaaggtactcctggaatttcttttttatgtcactgtatgcttataaattattagcattattttaagaatatttctcttctctaagtatacacatgcataatttaatgttatacatactaattttctatcagaaaataccttttgtggcaaagaaacaataatgaaggtttagaagaaaaatatgttgtaagatgctattgtccttttctattagttaggaacatttactgaatatatgagaatgaattgaattgctttggttctcatgaataaacctattaataagaaccagtaactcaaggtaggctgccagattttcatccactctggactctctattaacctttattcttgttaaagacaggacccttggcgttatgtctctcttcatgtcttatccagtgatttgtacatagtaggtatccaatacatatttgagaaaataaattagaaatattgttttatgacagagttataaagctctttaacatttataccatagctattgtaatcctttaaaaagagtagtaaaaaatgaccttaaaatggtatttagaaatttatccaaaaaatgaaaataattataaatgaaataaataattattggaataaatcatttgataatcatttgtcaagcacttattttatattacttccaaaggaaggcaatgatgaaaatatataataacaaggataagaagctattcctcaactattgtaaaatgggaaagaccacaaagagaaacaggaaaactggcctagaagagcaaactattaaaatacagatgaaggggcagggcaggggaaaacttttggccttacttttctcaagggaagacagagaactgactctaacaaaatagaaagctcccaagagaggaaacatagatactaaaggaatgccaggtcattccagaatgagcaataggaaattaaaccaacattcaatgggttctatccaaagtagaccataagacagagaaactcctgtgaaatctgtatgaaacaggcaatactgatgtagaaagaactgaggaataaaaagaatagaaattctccctttgttctggatactataaatttttactaagagtgatatatgaaaaaataccaaaaaaaaaaaatcttcccatgattcgatctgaaagaaaaatgtaattcatgtgtaagaactggatggtagatgtttgtatcaagtaatataatcatgctatctccaataaacatggatttaactttttcttgtttttttacagtttattatttattttattcaggatattatctcccaatgttatacaaaatactgacaaatgtcaatgtcttttcttactttccactgtatcacaggttttcacttcatttacttccgcaggtacccttgtatgtgtgtgtgtgtgtgtgtgtgtgtgtgtgtgtgtgtatacatatataaaattaaaggcctatccatataaaaattatcccccaataaacttaatctcagaagaaacaaatcacagctgtaattttacccatacataggaaaaatggaacacaagagattagataaaatagtaattgatattttgactattgcaactttatgaaactgaagattttgaatgataatgactaagaggaaagaataaacctgaggaatggatgtgaagattttgtgtccttaggctaaaggacaattagtcatgtttggatttctaacatggtatcatgaaccctcagtgggtcagggggctaaggacataatactgtgctgtgcaagctctacagctaaccggcagcaagccctgacaagttgcttggcttcaatgtgcatcagcttctacaattgaaaaaaggagaaaaataaggtcccaatgcttgtcttattggattctcgtgaaaatcaaatgacactggaaatgaggacactttataaaccctacatactatataactaccagttaaaggattgttattataattattatatttacacaaaatgtgatttttccatagtttactctaagaaaaggatgtattattttcattttggccccattcatgtaatacctatttctatcaccaataaatgcaataaaaaatgagcttaagaacaaatataaaatatttatgaaaattacagcatttgatactaacaaccacttcctccttcttgaaatgatctccttgtttggcatttatgacccaccctctcctggttcattttctacttctctggattatttttcaggatgctctcctgggatcattttctctgctagctgaggaaatgctgaatttcctccaagattttatcctcagcctattctccctttaacatgcccactaggctctcttccaacaactctcaaagctttaatcctccctctctccccaatgctggtaattccctgacaatacttctaaccacaagctcacctctgaactccaaactggtttatcctgttgtcccagaggcatcttaaattcagtctggcaactctgaaaacattttgtgttcactctctttctctggcttgtactatcttagcctctatgactctctcagatcccaaatccagccaatcctcaagctttgtcgattgcatttccaaaatatttctcgtatcaaatgcttctcactattgcttgtcttctcccattttatagcacccagctccttgcatccagacttgctcaggtgcgatccattctgccaaatatagccagagtactttatcttgtgtaaaaatcaaatcacgttaattccctgcttaaagtccttgaatgactatctgtatgtgactacctacactgacgggctgaaggccaaggaacttcacaggacatttaaggcactccatgtagcctcaaccaccatgtcacattcatgctctgttactttctatgtaatactttggactttataagtactaatgggattgtaagtcctcatattcacctgaatatttacctgaaccaaagttttagcttatgagcctttactttggcaaatgtctctttgcccagcatatcctgtctacccttgacttgccaggctaactcatgcttatcattttaaagatttcatctccagaaatgatggcaaattttcaaactcccagtgatgggcattttggtatgcttccacagtttcacaattggaagtctacgtattatttttaaatgtatctattcatgtatatacattttgccagtaaactctagtatttccaagaccagaaaaaaatgtcttagggacctttgtctctggcttatattagataattaaagtggaactaaattttgaacaaattggcaatgatcctaccaccaagcacttccttctggcactgatacattactaatgtaatggacaagaatgaatgcatgacatcaaaactacagaggtttcctttctaattactctggactacaaggacaggtagaaaaattataattgcaaagaatgtgatgcaagaaaaatcttgagtaaaaacctctttataaaaagaaaaatctagactcaagtttatgcccaaacatcagttatatcaaaatacttcagtattgacaattgtttaaagacatattttatccatatcaggttaatgcagggattttattgctaaatcatgatttcttgcacactctaagatattggatcggaaattctgaaaaatagcatccacctgaaagtatgttaggagaaagcaacttgttagcataagacgaggtcatttctttcttctcttctgaacctgacacacagcattttaaaattaaacagaagaatattctgcttcctagggatttatgccaccatctaccacattactcaaatgaccactgctactcattacataagagatcaagcacaactttattcatgaaaagcagacatgaagacaacttcttaaaactcaggcttttaaaatcagactctgtctcatctggtacctattgattgccttttttgtcaatcggggtgggtatttacccatctggtatagagaatagatactagagtctgaaattggacagaactgtgttccaatcccacctctgttgctttctgtttctagctctacaattttcaagttacccaactcacaagtctttttcctcatatataacatgagaataacaaaagcccgcacttacaacatatcaggcatgttttcatggctttgcatctattattgcatttaagtcacccaatagtcttaagaaataaatactacaagttgagcattcctaatccaaaaatataaagtctgaaatgctccaaaatatgacatttttgagtgcctatatgacaccacagattgtccttatataggtggctaaaacagtgatacctttgctttctgacaattcaatgcctgcaaactttgtttcatgcacaaaattactaaaaatattctataaaattaccttcaggttatgtgcataaggtatatataaaacaaataaattttgtgtttagatttgggtcccatccccaagatatctcattatgtatatgcaaatattccaaaatccaaaagaatctgaaacactctggtccaaagcattttggataatggacactcaacctgtattatttcccatttacaactgaagaaacggaaaggtcccagcagcagaatctgatttaagtggaccatttctagagttctgtgctcttgtgctatgttctccagacccgtcgcacaatgtttgtataaagactaaatactttaataggagtaaaatatttaagatgggtaggtactcaataataattccctctatgcttttcagatgtattcttctcttccttctatggcagaccctcatgcaaacatctcgacatggctttaaaccacaggagctaaatatcactaagtgagggaagatgaccaataaaaactgaagaagaacctagaagtcacagagtcaagtgaggcttttataaattcttcaggtctagtttctgctaatatggttcgttttatttctttacaagaatgtccagtcttttggcttccctgggccacactggaagaagaattatcttgggccacacataaaatacactaacactaatgatagctgatgagaaaaaaaaaacaacacacacacacacatacacaccaaaaaaaaaaaacccctcatatgttttaagaaagtttgctaatttctgttgggcctcatttaaagccatcttgggccacaggttggacaagctagctttagcatatatcaagaggatcttacacaggggaaggatcagggaagtctccctcaggaaaggatgtttaatatgcaacatgaaatataagaatgaggtaggcattgacaaaaacaagcaatgaggaaaggatctcctattcaataaatggtgctgggaaaactggctagccatatgaagaaaactgaaactggactccttccttacaccttatacaaaaattaactcaagatggattagagacttaaatgtaagacccaaaaccataaaaaccctagaagaaaacctaggcaataccattcaggacacaggcatgggcaaagacttcatgatgaaaacaccaaaagtaatttcaaaaaaacccaaaagtgacaaatgagatctaattaaactaaagagcttctgcacagcaaaagaaactatcatcagagtgaacaggcaacctacagaatggtggaaaatttttgcaatccacccatctaacaaaggtctaatacccagaatttacaaggaacttaaacaaatttacaagaaaaaaacaaacaaccccattaaaaagttgtcaaagaatatgaacagacaactcaaaataagacatttatggggccaacaaacatatgaaaaaaagctcaacatcactgatcattagagaaatgcaaatcaaaatcacaatgagataccatctcatgccagtcagaatggcgattatttaaaagtcaagaaacaatagatgctggtgaggctgtggagaaatagaaacgcttttacactgttggtggaaatgtaagtaagtttaaccagtgtggaagacagtatggcaattcctcaaggatctagaaccagaaatatcatttgacccagcaattcccttactgggtatatacccaaaggaatataaatcattctactataaagacatatgcacacgtatgtttattgcagcactatttacaatagcaaagtcatggaatcaacccaaatgcccatcaatgatagactggataaagaaaatgtggtacatatacaccatggaatactatgcagccttaaaaagaaatgagatcatgtcctttgcagggacatggatgaagctggaaaccatcattctcagcaaactaacacacaggaacagaaaatcaaacaccacatgttctcactcataagtgggagttgaacaacgagaatacctggacacagggaggggaacaatgcataccagggcctgtttgggggtggagggcgaggggaaggaacttagaggacaggtcaataggtgcagcaaaccatcatggcacacatatacctatgtaacaaacctgcattttctgcatatgtatccgagaacttaaagtaaaattaaaaaataataaaaattataacaataaaaagaatgaggaccaggcgcggttgctcatgcttgtaatcccagcactttgggaagccaaggcgggcagattaccttaggtcaggagttccagaccagcctggacaacctggtgaaatactgtctctactaaaaatacaaaaaaatagctgggcatgttggcatgagcctgtaatcccagctacttggggagctgaggcaggagaattgcttgaacccgggaggcagaggttgcggtgagatgagatcccagccactgcactccagcctgggcgacaagagctagacttggtctcaaaaaaaaaaaggagaaaaaaacaaaaaagagaaaaagaatgtggtagatatacgcaagataaaaagaagaaagaacaggttttgtaactgttggtcccatttctgccttcctgagtagttaatacatttcaggaggctacagaccatgtctattttattctcctacatagcctttagcaatcagcatagtgcctgacacagtcagcattcaataaatattgaaagaaggaaggaatacatgtatatatgaaatgtgtgaaagcctgcaagcaagtttaaggaactgagagaaattcaggaactgagcgaagaatgtacaaagatggcagaagaatttgcaggagccagatgatggagggccgcatgagtgattatacgaattttgagctttatcatgaacacagtgggaaacccctggagggttttgacagaggagagatataatcagattgcttgtgaaattagtgatgtgccttatctcccaaatagagcagagtcgaggaatcatcatcaagaaggacattagtttctcagagtccatcctaccatgttccagtggtttctgcaggtgtaacctagaagcttgaagcttggggaggacaatgtatagccagctaagaagagaagtttctggccatctatttagtgcaatcaggtcatgtttgccagcttcaagataatgttcaccagccccacataatcttgaaagcaatagtgcccccatgataggttctgccatgtttgatttttcaaaatgaatttttaaaatataaattcttcagttcttttcctctgtattacttaatttctaggttgtgataaatcctaggatatgttacgctagatatccaacatccaatgttttattgtttttctcataactctaaagactacaaaccttcttgaaaacaattacataactgtctcttttgtgaggtggctaatctttagtaacactgaacacttttggctgtacgaagttttcacagaacattcagattaagcactattaatcatgaaattacagtttgttaagtaaaatgaaaagttcaatttttaatatactacgcccacaatatttatttaacagagtaataaaacataaatgctttctgaaaactaggaaaaacaaaagtgtggttaaaaatccctttaacattcacttgaaaggcaaaaaaattattttttaagaaatattcactctttacaaagtatctaaggctactcatgtgctttcttttctctatatatagctatgtgtcacccatgcctttctttgtaatttatgtttaaacaaattttaaagaccacaagtaggcctttgctctatgaaataagccatgagatattaatgcaaaagctattgtgctgagagctaagaaaccctacacttccactctcaatgctagtgtgttaaaagagattttagtaatggcaaagccagtcaacagggaataattaaactcaagttgtctaagatttgctgtgatgtgtggaatgatagtttccaacccagctgctgcggaatgtttgcctaagaagaaagtgcagttgactaggggctacagttcagatgaaatgcaatgaaaaagctcgttgacctctaaaacaataggtggggcctactcgaataataaaatcaacacaaagtcaacaattaaacaagaatgtaacaatagggccatctcaatatcatgccactaaaagtttttaaaaggacagaattactccacagtaaactgacaaatatctacacttggcacctcttacaagctaataaagatgtagactggcaactgtgataaacaaagcccttcatgaataccttgcttcttttttcctcaaaaagtttttcaaattcagctcgttaaaaggacatattatatttccttcagtccagcagccggtctctctttttaagctgtcaactaagcagtcataagctcacattgatagtatgttatctgctgagtcccctcccccaggactccccatcagtcctagacctgtagctcagcataaaccaagcagtgtgacttgttctctattaaaatgactcattggtaatgtagtcaaccttaatctacaatgcagatgaagaaaaaagacaattttcagccaatttgttgatttactttcggaattcctttttaattttactagtttttccgttgtctggcatttacaatatagtcacaaactaaaaaggcaattattttcctctctttcctatctataataccttaaagttcaggcccaatattatttccatttagaaaattatttgtatagctatttgtaaggtctttataagctaaggcttgccaaggtagttcacatttttgatttatcgtggctagacttggttggcactaaatgaaaaggttttaccatctaattttaatgtcaatattaatatatatatagacacacacaaatacacgtatacatacacactatgtgtagtatacaagtccctttagccatgtgtgtatgttttgatgcgcaaggtacttacataatgactggccaataaatatctcaaagattgatttgtaatatacctgataagaaatgatttcctactacttatcatgtgtcctgttaacatggccctttccttgatcacctcctcatacatttcaaacttcaaatagagtttttaaagatcctgagtatttgagttgcatgagacaaaagatgacaggatttcatgttttgtctttgtaagtattggagcttcttcaccttctttccttctgattcattttgaccacagacttgcactttcttattgtatatctcaaaaagggaaggcattttctgagatcctttccagtattctctttatgtatgtgtgtgtgtgtggagatgatatatatatatatatatatcaggctgtgtgtatcaaaagttccaaatcggagagatgtcaaaaatttaattcaataaatatatatttagcagctaccatgttatcaacacttctaaggagatttccagtcttaaaaaaaggcaagcaaacttaaattatgtaggaagtgaaactaataagagttataataactgctgtaactttgctgagctcttactatgtgtgaagtattatacaaagtattttcctataaaattactcatgtaatcctcataactaacctgtgaggtacatactattattaatcacactttatattcaagggaatgaaaaacagagatgcccagtaatttactcaaagtcacacaggctagtgagccagtcagtttggctccagatttgaatccttaactacttgacttaactgtctttctgtagatctatccagacctatgctgcctaatacggcagctactagccacatgtggttatttaaatttaaacagaaattaattaaaatcaaaattaatagtttggctatttagtgccattaaccatataggtcagtaaccacatgtgaccaatgccagctgtactggacaatgcagatatagaacattttcatctttctagaaagtcctatttctcagcactgactaaaaaatcagcaatggttccagaggaacaggtcagcccttgattccacacaccaactcttaactaggttagtgagatttgttttttaaaaacctgctactaaaaataattccagacttcaattatgcctcaaactttaaatgataccatttacctgcttttcccaagggtgtaactttgtgagtaaagtgaggattccaaaagtaccagagatgtgtcatagaaatagggttagtgacagtgtgacccagaggtcctggataggaaacttaaactgtagttatacctgcatctatcatgtaaggagacacatgagaagaaacaactgtatattgaggaaaagcaggattatggagtcaggcgaacttggattcaaaccaactccctgcttctgtgaccctggaacattaattaagctatttaagcctcagctttctcatctgtgcaatggggctaataatgtcttttttgcaggttattatgagaattaaatgataaaacacatacagaattcttgctcagaagaggaccttagaaaactatttttctatatctggagatgaaaaatacaaatcaaagctaaataacaagatgaaggataggaagaggaattatcttgctaggtgctacagctacttgaactgagtctaaatattcacagagctgagatgtttacgattaattacctctgaaagtaactagttgaaaggcgtttggcagggtgtaatataaaatagagctgccaaggctaacagctattattaaatgtctgcatattttaacaactgtgcttggcacttttattctcactttattcaaaagacaatcagcatactcttctttgtggtgttcgttatttcatacaaacaagcagactctcaggttttacccccaaagattctaaattataaatctgggattaagtccagcaatctgcattttaaaacagtatcacagcttttgatgcacgagctccgctgaccacactttgaaaaaacagtagagatccaacttatttaaagcagcaaagcaagttgtgagtctacgtttacagggatgctatctaacaacttcaattacattcagccaagaactcacaagtgtagagaaattccctttaattttggtggcacagagattaagcacatgtgccaaagcttatatacttttcttaaaagaaagtcatttggtgtcaatttgctttgatttaggacatgaatcaaacaaggcccagttggctatctggccttctgtactaatgattttagaaaagttttcatccttaatggcaacgttacggaagctacagggctcaaacagatgatcttcagatatattgagaattcacttctctggaactctaactttcctgatttgcattaataaatgagatgctacttgaacacctatcagtattcagatattagatacaaaaaaaaaatacttggctaaacagagcttgttgagattgagcagaaagtggagtcgaggtctggctcaggactaagacatacatgaatttctgccctaggtccacaacttcttaggtacgaggctttgtgcgagttaattaaccttgctgaacctcatgattctcatctctaaagtgaagattatactgtagtacttataatgctaatctcattatctctcatgaggtaatgcaagtcaagcatatagcacattgtttggcacatagtaacaaaggcaagttgttgctgttgctactgttaccctagctatgtgatggggatagagagggctagtgagcttatctggattaatctggactccatggaatgaagaaatgcactcattgccatagggtaggatttctgaagacaatgaacacatttcaaccttccacctttctcctgtgagacatagtctctcatcccattaattcagcaatgaatctgtagtagattttaatctaatgcacactttactattgtaagaatctccttcagatccctatctctttgactttagatttcccccttcttacccaacctgcacttgacttttaagatcaaccatcctaaatacctaaaatgccactattgatatttcacccttttgctgaaaaatgttctttggcttcaccattgtagcagcaacagcaggaggaggaggagccagaggtcatatgaactgagcagctcctcctgcctcacaggcactaagctataagctggggtagaaatataagagccactcccaacttcctgccttccaagaaggcagggagaaagcaatctggaggtagaagcaactgatacgttaaggactgtagaagatacatacatacacacacacacacacacacacacacacacacacacacacacacacacacacacacacatatatatatatatacacacatacatatttttttcttttttcttttttctctttttttttagtgagacggagtctccctctgttgcccaggctggagtgcagtggtgcgatctcggctcactgcaagctccacctcccgggttcacgccattctcctgcctcagcctcccgaatagctgggactacaggcacccgccaccacacccggctaattttttgtatttttagtagagacgcgatttcaccacattagccaggatggtctcaatctcctgatctcgtgaaccacctgcctcggcctcccaaagtgctgggattacaggcttgagccaccacgcctggccaggactgtagaagatatttatgatgaatgtctttctgcagggtactttctcagggacagctacaagagtaagatttgtgttgaatgaccaggaatttgcctggtagagaaggtagggaaaaagaagaataaacgtgaccatggacttcaaagggagaaaatgaacataaacaaagacacacagtggtgaaggagcacaatgctttcaggagaattctgaatgatgactagggtgaggggcagagaaaggggagaaatgaagctaaagacgtttggaattaaatcacggagggccatgtatatcagtctaacaaggctggctttctaattttcaaaatgttttagtgcagaatacattttttttcctcaagcaaaatcttaagcaaacccagaaatattgaacaagtaaaaagtgatggtgtatttcctgaggaagaggtaggagctaggaggtcaatccacctggctttcccttccccagtgctactctttaaggcgtcccatggggtcttgggactgagcagaacacagtgagaaactactgctatggacaacagggagccagagtaatgccttaagtaaataaaagtttaactcaggtttgatggttaaaaaggagggtctcaaatggaaaggagaccatttagaatactcttacatgcagtcctagcaataggtggtaaggctttaaattaagggaaaggcagagtgatttgaattaagcagaatcaagaaatatttctggagtgcagaccattacatttggcaaatcactggacatgggagaagagaaaaggagtgccagaagggaaggtgggcatctaaattccagcttgagaaataaggtagatggtgagcctattaaccccaaaaggaataaggagagggcggatatatttcactttatttgacgtggggcaaaacggaaacgttcaggtggagatattaagcaagagggtagaaatataggtttagagcctacgataatgatttaggagtctataatggataagtagatagtatctttgaatggacatgacccaggagaatcaaggacaggaagatgaaggtgctgaagtgtggaccctgggaaacaccatttgagaactgtggaggggagaataaggatagcccagaaaaggagactgagcagaatagaagtgaatgaaccgtggtctagaagccagagaggacatagagtccaagaggcaagaattgtcccacgaaagttatggaggatgaagggctgaaaaactgacactctgtttggcagctggggaatgttacataccttttcaggtgttgtgggcaaaatgaagtttgcaataagataaaaagtgaatggaaattgaggagatagagacaaacagcaaagactatttgctcatgaagaaaggaaatgcaataaggtagtgtcctgcagatatggtacttatctttaaaagtcttccttgaaggcttcttttctacggttcacaataacctctttcgcctctaaactccaagaaaagttcataatctgtactcttaggggatttactattctatcattcactaccctagatcattctatcataatttaagagtattttcttgcacacctcctaatgatgtctaacaagcatctaatgccaggctgaattcaatttacctttaagggtaattcaaccgagtcttttctctcattcttctctctgccctcccacactcatactgaatttatgtcagttcatgggctctgccatgctttcttttgtctttgggctgatgactatacatcattttctgctattatacaacttccttttattggaataaaggaataatcatctttcaggtgttggcttagacaatattccctcaaggaaactatctctgactccctctggacttggttgtgtatctcacccaaccattgcccatacctagtatcttatgcttctgccatgacagcactgtatcagttcactggactgtgtccctcacttgatctcctaagggcagagaaagcatctgatgtagttatagcttatttccaatacctagcttagatgagtagtgaccagctcagtatatgggctaaaacatttgagaaataagggagaaaagaagaaagctggtcatgagtaaaggtagggaaagatggaaaggaaggaagaaaggaaggaaggagggagggagggaaggaaggaaggaaggaaggaaggaaggaaggaagggagggagggagggagggagggagggagggagggagggaggaaactaatttggttcccatttcagcattgccattaactattgggtgactttggtcatacatgtaatttgttaatctataaagccaaaatatcatattaaatttattctaggatcttttccattttaaaattggattcaaaaagaaatctagcatttatttgcatggttcagatttctgaatgtaataactgcataactatattctgtgactcccagtaacttttacccctcaataaaaaaatagaattgctgaacttttctcctcaaatgactatgttaaaaatctgtctgagtttacacttgctaactaacgaaccttgactaagtcacttagtcttgctctgactcagctcctccacctagaaaataaagtgatgattggggattaaatgagagaggcaagcaaaggtgacttatgagctgcagtcgtctttacgtaggttagtcagcagatattatttgtaaatagggtttcatttacagaatagctaccttgatttaaggacatcaagctacttgatatattagtcactggtagtgcagtgatgatcaatattcagtaggtagttaggtgaacaatttaacaaaaacttggaggtttaaacttgttccgaagcaatagaaaagtaatttatttactgttaggtcttagaagtctgactgtacagtgctgttctttggaatccagcacacattatgatgcttttcatagtcttcaatggggactactacctggaaaatcatggtagaagtttcaaattcaagagggtgcctttctcacccttcaaagaagttgcagattttaagagtctcttcctggctatgatcaacctctcaccttactgacagagtttcaatttaaccaaacgctattgaaacaaatgactgctacaccatactgtttctcattctttaccaaggagttaagtttcacttagcagaacattcatcaatgagtaagaaaatatacacaaatacaaataaaaatggaaaagccaacacgttacaattttttgccttatgtaagctaaattttcttccattggaaacagaactacttgtgcaggtggttgctaaatgctaccagctgctctgtggcaatatagtttctgaacagaaccctaaaaagtaggatggagaggggaaaaataaagaaatgggtgtggaataagactctatattaaactaattccctgggtaatacaggagagggggagagcaagttctgtcgtaaacagtaagcagaatttccattcagctggcctacaataaatttatttttccaagaaaatgaaatggaacaagagaccagacatacctgctttatgttaaagaaaagcatgtatgaacctaatacaggaagaagttgtttaagactgtacatccttgagaaaatattacctccataatagtgccagggtctctgttaacttgggttatcagctacataaattagacgcacactggggctgtctaacttgtatagcaatctgcagtgctcatataatttgtactttgctctatcatttgcttccctctgtcctcttttctagttaccaacttattttttaaagctttgcacaaataccattatagctatcttatttattgtaccaattaaaaaattgctgagaaatgaagggatctacttagattcccgtaataaaatgagtgatccgaataaaaaaaattgaaaatcacataatcactattttaaggaatgcaattctctctcaatacctgacaaccttttttcctttgagcaagttcttgacaatgccaagactctaactattaatatacttaatgtcagcatatctcctaccctgattcaaaaagcaagaaacaggatgaaatgggggaatacaggagattaaaataaaagaagaaaaaggtaaaggagaagaggaaataaacagaagaaatattgagagaaacagagagataaatagcaaattgtggtcttcgaatgagaagatggagaggaccagaagaaaaaaatagagaattaaggaagaaaacaaggtcaatttgaccttttgtgtagctttttatttatctgagtaatccgaggggtaattacaggtctttgtcttaatatggaaaaataactatgatgtatgaccaagacacagtactccgggagtatttccgtatagcctacagaggagctattggtgcctacctttatggacatcgggttgtgatcatattttttgctaggtctgctgctgccatgactctgccattgtgctcattgtgaactcagtgtcttacatgaaaagagccacccaatctcattttaccaactctgcatactaattcacaatagcatataatatccccacatatgggtttttaggtcatcaatgaagctgaatgaaaccattctcttgctaagtacagaatttagaaaccaagctgctgcaagttgaaacatcagtcacagtctctcaaaacattatgttacaaaggctgtgatgaagttgcagctctgcccatatttccaaaagtaatgacacttcatcttaaaggcccactcagttatgtcacatttatatttgcatcctataatgtgaatgtattagccccaaattgtttggtaataaatcatcatcaaagaaatatgttcatttttacttttagtattcatgactcgcatgatcctagaacaacatatatttagtacttcagagcaatgaatccataactttgagagaaattgccttatagatcattaagacctatgttgctttaacagttaatcacattttcactaataatatgacataagtcctttacctaaagagtgaaaaatgaatgactcttttgcttgcactaaaaagtcttctacttgacctttactaggggcagagggaaatccagtataatcactgaacgctttccctacagcagtatcaatactttcattcagccaacagacttcaccttcagttaaggctccttgagtccccaaactccaggggaaaaaaatcctttggggctctgctgtagctttgaacctagggtcatgtggtgatgtatcaatgagccctgcatcttctggagaatacctcagatagctggcccaacaaagacaaatattatggcagcaaaaaataaatctgccatttttaaccttttcagggaaagtaattcacttattggctttggttaaaacgtcttacctttcttcccctttttgttgtatctgtgagtaatttctccagtcacattgtttataggaagtgaagttattcgtaatcatgccttaagagtatgtacacaaactggacatcctaaaagaccgctatgtattaaattcctgattgtttgacataaattctctctctctctttcactccgacaggaatcttctcatttatttacgaataggttaagaccttcgccttgtttctaactatgttcctaagtgctaacatatattaagtaaatttagagcctcttctgcataggaaacaaattaaattggttaaacatggagaaagactaaatgtaatccatctcttgtcatgtttatgatatctgaactcatcttatgtgaatgttccaatttggcagttgtagcagatgggctgcttatgataaaacataactacagacgcagaatgtgataatataaatcataaaagagataaataatgaaattcttttaaaataactctggctaaatatttagacagtcaatttttaagcttacttgcaacacaaaaatagtattcacatatctaggcaaggaaagaaaggtactcaaccataatataaatataatctaaatctaaactttcaggactcaaggtattttaaaaatctgggtgaatttttaaggtagcaaaaaataaagtcgggagtcttttccagaggtactcaaaaccagagatggcactgatgaatatctctacacagctacccctcattccaaatcccatttcataactccagaattaagcaaagtctcctattttatgatctatatcagatgataaaggaaactcagtgccactcttgatggacaacttaatatccatgaacctgctatcaatgtatatcagtttgtgacctcatactgcttagagttgcaaaatatatttacatgaatctgatcatctcaaaaacctcatcacaggccaactggtatccagatcatatagaagaggaaagtaaagttcagagaagtggcttgtccaaagtcacacatttatacatgataaatccaaaatttgaacagacatttttgtctcccaaacaggtgctaattattaatatcttaatcatggtgtctcatccaacttacaaacaaaggtaaagattttaactcagagaagtttggaatagattgtacaatgcataaaagcagcccaggtccccagtccacagtttgaagatggccagaaacaaagagataaggggacaaaatcagtacaaatgactactcaggcagtttgggccaattatgttgtatatcaatgtgtatctacccttactaggtggccacatctactcttacactttcaatatgtacagagtaggcaattttacccatagaaaggctggcatttggtgcactgtttcagataccaggagcaggaccaattcccatctgggatgctgactccttaccatccctactgcagattcctggaaggtagctgtgctttatctgaaaatgaacttgagagagctcttaagatacttttctattagaaaacagcattgcccctctctccacttgtccccctcctgtctttccttccctgttatttattgagctcctactgcatgtcaggctgtgcatccataaagaaagcagccataggccaaagctccatggcacttatcatctgctggtgggtgcagaaatataaacaagcacattcaggactataggagtaaagaagagcacctgcctggaccagggatgggggtgaaggaagaggaccaagagggtatatataaaacttcccagatgaaggcaggtctacgttgagacctaaaggaaaagggagaatagatcagataagatggaggaggacaataaaggctgaaggtaagatggataaaatatgtttgagtggattttgttctgttgtttttggtagagggaggagaatgtaaggaaagagtgaaggtagggagaaagaagtggaagaaagaaagaacgaaggaaggagggaaggaaagaaggaggaaatgaaggagagaaagaagaaagacaggaaaaaacagagagaaagaagaaggaaagaaaaagagatagaaaagaaagaaagaaagaaaaaaagaaagaaagaaagaaagagaaagaaagaaagaaagaaagaaagaaagaaagaaagaaagaaagaaagaaagggagggaaggataaatctctttgctgtgtaataaacagaggagaaacataggtaaaaacactaaaatctgatttggtggaattttgtacactgcagatatatgtcagattgtgaagaaaaagtggaaaaaaagaagcatgtgtatcggagatactgaacagagaatagagtgggtggagtaagcctgtaagtaccatttcaatggcattagccggtttgtgtctctgctgattctacctggtcttagaatggaaaagcttgatttactggactgttaaggaacctaaaaatgaaaaatactatgcataggtttgaggatcacagccaacagtttattataagtctggaatgaagtctcaacttcttcactaagaactcatattctaacttttgtttatttgctttcttatttatttctgttgaagattttttctaaaaatactgaattggaataacagagcccatatcttttaggtataaccttgtaaaacacgtttagcaattcaaggcagtgatacacaatatatcaaatgtaacatcattcagacataaccactaatatcttcaatgaaatatatatttaagttttcctctctgagcaagttttcttagcatttcctaaaacctcaaatttttttatttaattttaatgtattttatctaccatgtggacaaaattatggcaaatgtgctatgttctattatcctatgattagcctagtagaaagtattactgaagaatatggacattatgcatggacacttctttttgtttttaaattgccaactgccaaaccagcatttgccatattccttccaatcacataagattaatcaagagagtttaattaaacaagtccaactcaccaaaattaatgatgttcactgaatgaccagattttcattccaattggaagtactttcatacttttacagacagtgtgactatccactttgcaattgcagtgcgacctgtgaaacttgcataaagacctcccctgaattattgttacctacatagttacagtaacttggaaggtgatgtcatgcattcacacaaaacatagaagtgatatcttgttgtttatttttatcattggagcttgttggatgtttgggctcaagaatatgcaaacagggttaattaatggctcaatagcaacctagaaattatcctattccattcagacattttatcagtgacttggatgatgggggcaggggtaatatcgaaatgacacatgcctaagggagggagcagacatggggtaaaagtagaaagtctgtaaaataacagaagctagatattaaattatcttaccaggtcagagctatgtgtctgaattaatttttaaaatttaatagacatgaaaatcctgcacttaggtttaagaaatcaattgtctaaatactgaatggacaaagacttgacttaatcatagttgacagactttcaaattctatagcagactgtgatataattacccacaaagcttctaacatccaagagtatccatagaaatatagtgttcataagaaggaaaaaaatagttctcaactctgcatttgttgaacatcactggaattcggagtgagctaatatcagaagacattgtcaaatgggccaatggctgtctttcagtcattcctttctgatctttggatttttttttctctaaagttaaaataaataaattttcctatcccaaaatatcttacagaataaggaattattagcctaaagacgttttagaactgcacaggggtcttcaatggtattacacaaaaaatatctaaaaaggaaaagcagatgagaataaggcctttcaatattttcatggaaaaacatttaaagaaaaaatattaaataaaaaatatttaattctcaaggatgacatggctaaaaagctaaagctcattttgaatttttggaatgttaatcacctatttcaaaagttttgattttagaaattaaaagtcattgttacaatttaagttatagctatataaaactatggttagtgttagtttaagggttatagttaagtgttacatgtttaagactaaagagaaatgaatactaattgaaattaacctaatccattggcaattcttttattaaataatgttcctttttatgtctcatgttgcactctgaaaataaataacaaagataacaaacttttcctccaaatactaatactgtaatgacaaatgattacaaaatctttaagtaaaatttaatgaaaattttattgaataatgactcatatatgcttttcaaagatagtgagaatgtagcttataaaatcagttactgtacctttcaagatgaataagcatgatttggggaacaagtgcaattttctgataaaggaccaacaaggtaccttctctgctatataaaaaaatcttaaaaaatgcttgtttgtcactgcatgttctcactcataggtgggaattgaacaatgaaaacacatggacacaggaaggggaacatcacacaccggggcccgttgtggggtggggggagtagggaaggatagcattaggagatatacctaatgttaaatgatgggttaatgggtgcagcacaccaacatggcacatgtatacatatgtaacaaacctgcacgttgtgcacatgtaccctaaaacctaaagtataataaaaaataaaataaaatgcaatttaaaggttaaaaaaaagcttgtttgtaaacatcttaataaataacagcaacaacaataacaatcatataggcatgcatgactatattttttcctcctgaacaacatatctcaggaattgttgggcttacacatctggaaagccatatttgtttgtgtattttccatgctgacactgccaagaaactaaatgcagttgagtgttaccgctgaaatcaccaggagtcctagtgccaggctgtgccagaatttgccactccaagttgcagtcagtctttcaacctcagaattaaatagagcatccgccaaagtagtatcagactgaagctgcttaagtggctttgaccattaaaaacatacataattacacttacattctgcgtgcaaatattgtgctatcatttgagagtgcaaataagcagtcagccacaacccagaaagacagtagtctacaagagagatgaaggactatggtagagacgggactgtggatctgtgtcccatctcagccacatacagctatatcattctagcaagttatagaacatctttcaacctcagtttccacatctacataataagaacagtcatacctgctctatttgcatgaactttttgtgatcatcaaataatacaaatgaaatcacttgcaagaaccttgtaaaacaaatatacctattttagctaatcccggatcacacctctgcattgtcaatgttccattataattaaacaagatcctgaataccccaggtgaaatgagcctgctgtccaggtggatcaatgcttggtctaaccagagctgatgcccaacagggcctttccttgcagggccagtgaccgtcatattgagaatgcaagtctgaagactgcagtttgtagaatgtgactaaagcaaaaacctgccgcataaactgtgtttgttctttagacaatttttagaattaactgactctatagtagcttaagaaacagcatacaattttataacggaaaaaggtgataattttgactaggctcacaatcatttcttgttaggttgtgagataacttttattaacgccagttaattccttcctcaggcctgtgtcactttataaccctctgcttaagagaaattaattgtatgaattcaggtaagacaagaactaccataatagatgttttcactcttgcctttacttttctctgatataccttaaggtggtcagaggtaaaagctaaagatgcattgtagcctgagggatgattgaatgaaaaaaatgggggatgggaacagaacctactgggatagaccaatttcccaccactgtaagccagagcaattgattgatgaatcctcgctctgtcaagaggcagccttcagatttgatcacataaatactcattcaactcaaattctgcttgacaagcctcagacagctttgttctgtcacagatatcattggaaggaaatgctccattaatcatccttaattaactttaccatagtctgctgaaaccaatatgctctctggctaaactttggacttagccaggattctatagttatcaaatggaagagagctttttatgtttcttctctcctatcgttatgaactatagggatccagcatgaatagagttcacaggaagtcatgcccattgattatatgagatagcttatcagcgtgtgcattcttttctaaaggaaacataattttaaatatggctgacctgcatgagatggcattttatatctatatctcacttgatgctcagacattctatatttcctccccaattctcagctatcatatgtcctgagataatcattttctaagaggaaagaaaaattttaaaacaacaacaatagtaaagacttagtttgaaaagtaaagttgctagaggcacaaaatggtttgtgattaattcataaacacacacacatacacgtctcacattgtaaaatacttcacaattttcataaagctttaacatgaggcatgtgttttattttcatatttgcttagtgcacatattaactacttgtctcactttgaaattacctactgagaagtttattaacaagcatcctaattcagtggtaataagggcaaaacaagaaaaaatgagtagcattcacactttaaataaaaatagagttctaaatggctattattaaaagtcaaaacataaaagatgctggcaaggttgcagagaaaaaagaatgcttatacactgctggtgtgaatccaaattagttcagccattgggaaagcagtgtggcaatttctcaaagaacttgaaacagaactaccatttgacccagcaatcccattattgggtatatacccaaaggaatataaattgttctaccataaagacccatgcacttgtattttaattgcagcactattcacattagcaaaatcatggagtcaacctaaatgctcatcaacagtggactagataaagaaattgtggtatagatacaccatggaatactatgcagccatgaaaaaagaatgagataatgtcttctgcagcaacatggatagagctagagggcattatcctaagagaactaatgcaggaacagaaaaccaaatactgcatgttttcacttacaagtgggagctaaacatcaagaactcattgacacaaagaagcgaactatagacaccaggacgcactttagggtggagagtggaggaggatgatgtttgaaaaactacctattgagtactgtgctcgttacctgggtgacaaaataatctgtacaccaaacccccatgacacacaatttacctgtataacaaacctgcacaagtactcctgaacctaaaaattaaaaataaataaataaataaataaataaaataaaataaaataaaataaaacaagtgcagtgtgtgcggactatgataaatgaataaagtctccagtatatcccagtctactttggttggtgtctgctcatccatatactcagaggcttcatgactgatttctagcagcttctgatcttagccatatttatgtgttatgtgtttacaaggcaattcatatgataatgttagtgactacttcaaatgctatgcttttaaagccagaagatccattttagagtcacaagaaacttaaatttacatcatagaattctctctgtatattaaaaagtgctcctgtgaatgatctacagaaagggaaatggactcaaaatgataaggatgtgcaccctcattttgtgtgtgcaaactgaggtttgtgaagtgatgaactcaataaagaataagggttaaagatttctgaaaatgactgatctctttataaaattactggtttggctctgctatagcagactttgccttctcccctcagaaagaggtagcaactgacaggcgtttgatttatcattgatctttcaatgatatttcttatgggctatagttttctaattggaggcagaggtaaagtctgtggtaaagaacatctccgtgtggttggcagacttgctaaaaacaaataccaaatcatgttccttttgtgcaaaatgatacaaagaacacattttcatgaaacttctaaaacatagaatctatttgccaacattggagttttaaaaatatgtgaatgctaaaaaccaaaacttgatttttaaaatatgtaaactacttatgattcttctgacaataaaagatgatgttgagttagtgaccagttcataacaacagatagataccctgtttattaaaatggttcaatgtcttatatttacttactatgaaataaggttttatttttgaagaaaaactcatgtcttaaatcaaatctttatatcaaactttcacttcacattgctctccccttccctagggaaaagaaaaagtcaggaataaaaacaggtggaggaaatcttccttgttaaagtacatttctattttaatttctgattattattactgtaaattattctgtgctctctttttgtttaactacttccttcccttgctttggtgcccattacttcttccatggtttaggcatgaagttctgatggcaaagtcattatttaccttcccctcattccattccaagcatctcttcttttatttaatttcttctcttgccacagattctttttccttcgcataccttacccactgttcatttcttttttgctgattcaagttgaaatttacttcctgaccactcttccccataaaatttttagttcaagtatctatttgccaattactgtactaggcagtggggacagaataccacacataacaggccggtgcagtggaggaggtagacattaaacagtgaatcccaatacaatatgataaaagatcaagcagcattttagtgtgctacggtaacaaataattgggacataatttaatttgggaagagcagtcaggaaaatccttcctgtggaaaaaaaaattaaatagggacccaagagacagaataagagttttttagatgaagaagatggaataagtgtggtctatataacagtccacatggagttattcatttgtttactgaacatttattgacagccactcatgtgtccccaatgtcacctctactggccatttatttgtcaatttaaaactgatatttcagaacatgtggagcatacttattaaaccccaaagaatatatttgaagtagaaattaattttggaagcaatgaagagcaaaataaagacttatcctacattaagtaggagactgtttatttagaacctgctttgaggttacttctgctctttctcttccgtcagcaccccagcagagctgagtagatttcctgatgatagaggccctctttgttcacagtgaagtggagattggcagaaaaggaaaaatcgtggggaaaaatggtggagaaaaatggaagaggaaacatgttaacttcttttcttttgttttctttcttttcttttctggaaacaagttctcaccctgtcgcccaggctggagtgccatgatgcaatcatggctcattacagtctcaaactcctggcctcaagtgatcctcctgcctaagcctcttgaagtgctgggattacaggtgtgaggcacaaaacctggcttcatttttctttctggtttcaaagcattataatgcaatttaggcatacctccctaaaaaactgtgagttacgttacacatgcacaacaccataactacacccatttctgggtcttattgaaatctgaaaggagaatgatcaataaaattcttataacaatcccaagaagatcttgccaaattgtaccaaagggattagataagttgagaccatagtttcatcctagcgttactctgtcatttcatgaaacatacactgtatatttacatgttttcaaaggttagctgtgagccatggaaactgtatactttaaatatctgagtatatctgtatatctaaatatctgagtgaaaattggtggaaagccatccatttaagaagcatacaactctgcttatgtttttaaagatatttaatatcaagatatagtaaaacgttgtgttctgttttaggcaatgcaaagagttaagtagatttacatgaatggagtgggagctgggggaggacaatgaatgtccttcctcatttcaaaggtcaaagacagcattaattatttttaactaatgtcgtatttaaccacatgcaaacttaaatcagtttgggtctaaccaattcaaagctattctttggttccctgctctgctgcaataattgactaggttcgactttacaaaggtcaaaagaatggacttggttcatattctttcagctaatagcacagttcttaaatcaaaatttgagaattgatctttcaaagtcacttttcgtctctacattcatgtgtaatttcaaattatatgatagatgtatccaaactcactttttatttaattattttttaataacagaagacacagtgggaggttttttaacaagatctaggtttgtctaaaaaaaattcaaaagggaattaagaaaaccatgggaaacttgtcatttagcagagttctaatgagtaaagtggatgtgggcaatctgaaggaaaaaatttaggcagacataatgccgagcaacagaaaatgaaagcgatcttagtttggagtctaggcaaaatgtagagcaaagtcaagtcagatatttgggcaattaggtcttagaggactctaaacattatactaaagattaaaactattgctttagagtaaggtcttccccagacagcttacactatctgcccgggactgagcttctctgcccaggcctagagaccatggcttcattctagcattgttctgtcctccctctacaggcaagacctccctactctgatgtgccaggcttgttgctgaccatcattcaaattgtatatgtgataactcttcatccccaaagactttcctgactaatcagtggtcaaatggtgattacttcttaagactcccctatctaaccttataactcccacaagctatcttactctcatcactctgcaatatacatttacccttgccctgtagatagtgaggtctttattgaatatgtacatctgctcaatgtttattcagttgcatgtacgtctttcaagtgtgtcctatgagaattttatttcttgcaccttaaatgacagagaacatgtttacttaatgcactttgcattatgcctaacacatcaccaattgttgacaatattcaataagtacatttgattgtggcatattcaactatgattttagacaagatgtgtgtgtgtgtgtgtgtgtgtgtgtagacaaaataaaattcagaaagagaaaatctattctacaatgaaattcaatctcttacttagctattttgaaattgtgtcccaataccacattaacagagccaaaatgaaatttaaaattatggttatactattattcacactaggtagggtcaggtttttttgtctgaattaaatggctcctttacgctagctacttaggaaccacttcccataccctcaagctagagtaatagatacctgacccattttaaaaaggaagagggttccaatcaaggtctctatgaagtttagaaatgggttcaaagcctagttgtacatttccatagtaaatatatttttggtggatttttcaccaatcattcaatatataaatcatgttggctatatttagccctggataaagtccactttttcctgagtcataatgccaacttggctaaacgatcgtacatttccaatcatgcttaaataaacataaaatttatgtatggatgagaaggacatttcatagataatttttctggcttcagtatcaagcacattcatatttttctcctaaatctgaaaccaaatgtttgctttcctaatatttttccttcctactggatttttctttccttcttctatgtggtcacccacagcctggcctttgtgtattctcccaagaaagaattgtttatttatattagcagtcctttcaggggttccctgtagactctgtttccaatggtatgtggagttactaagcttttattgttgacaagtggtaggtgggatccaagcttttgtggttaaattgtttattgataattacctgttaattaccctgctgcctgactcctgtaatttactataatcattactttcctttttcttgaaaaccatgtgctcaaaaaacaaaaagtgaagacaaaaaatatacttcttaccacctttttaaaaaatggttggttttttaattaaaaccatttagagtcagagtatttttcatcgtataacatttggatttggaaaagcaaaccagtgttattaatgtaattataactatgccaagtaattgatttaaactggtgaatataactttgggtggcaatcaccaaattaggtgtcacacagtattcttgagtcattagtattttactttattgcagaatgttttccttcctagagttggccagaaattctgtacaaaatcaaagccttgaaacaaaatagactaaattctgtattatttgttaaggtttgaagctttttacattaagattccagcatctaaaattttaatccaatgtagtgacataatactctgtatccctgagataatgtacagagaggcctttacatttttaatatagttattatttctatggtacagttccacctaaccagacacggtgtaagagtacatcaatgtccagggagtgtacaactggctgcttcagtttccacacttctcaagaaatttcacccaactcttgctcccaaaagttctttcagtactaaaagcatctggtaaaataccttgccattagcaaaaaaaaaaaaaaaaaaaaaagagttaacaattaagtccaactttctgggaatcaaaatcagctccaccaggcaagcagatggatttattaggtgtatattcttgaaatgtaatatacaagggactgcaaagaatgatcaaataaagttctaaaatagcaaaccaaaaaagccctggaatcaacatagccatcatcctgccatttctcaccaacttcctctcatttctcacctttggactattttagcagtcattttcatggtatattgaggataagcatggtcaaggtgagcctatgaacttcgttggcgccattgattaaaactacagtttagaactgtccgtggtttacactgcccacttcacctcgacaggaagcaacatggagatgaatagcaagaatccttgatgtgcattttgccaattgatcaacacacatctcctgtgggactccctcggctaaatgcagcccttttgaaaacatgtcattttaataccacagtggaaagaacgtggtatttatgtttaaatagctggattggagtctaagtttgacacttactagatgagtaaacatggacatatcacttaacctctctgaacttactttcaccatttaaaaaatagggataaaaataataatattgatccaattaatttactaaagttcttataataatgtcaatgaggtaacaatataataatgcacatgaatacactttataaactaaaatgcactgtatgattataataatcattaatcaggaaaataattaacactcctttaaataaccattaaaagaaatttgccagacatagagaataaataggacaagcctatttaaatatctaagtaagagtgtcaatgcacacacattatagcatttcaagaaatatttttcttagggagagattaaagtcaggagaggaaatggaacggcttcagttgctgtcattgcattcttagtattttacttgggagaatgagccttgtcaaatggaaagactgaaatgaatacatttctcagctgcttagcagatatgtttcccaatataagctaaacagttcaaccaacctcatttccatgtgaatatctgcacttctgaatagatgataggaatgtgaagaagaatgggttgatcttggccttggaattatatggcttaggtgtaaatttattcttaattttcaatcattatgttttaacattcctagctgaaatttggttgagctatcaaattgttcaaaggccagttcatgccacagcccaaggaaccgctactgggagaaggtggaaaccctaaaccacaaccaagtccatccatagggttttccccatgaaggttaccacaacatacttaacattgttacagacaaattgctgccattaccaagccaaacaattctgtctttatgtttttaaatagctttggtaactctttagaaactttacagctggaaaggaactgcatcttgatggagctacgtttatagaattttgttctatgcccctttttcatttgtttcctgatttagacaatagccccaatttccagctgcacatcagttactcacaagcctggtctgagtctgtgattcagccaagctctgcacaattgtcccacagctcccaatagtttatcatcattgttttgtataattggaaacagaattatttatatgcccctgcctactctgcaagcaaatttacaagggaactgtgtctcttaatctatagtagacctaatgtaaacagtaatgcaaaagagtattcagatttattgtaggacttccttaaagatcaatatttaaaatgaatacatattgtgctaatttaaacatgcaacatatcacagagctatttacacaagaaatttacaatggcctaagacatttttatactctattcctacttcctaggaatatcttttatcaaatggaaagaaaaaaagagttacaagttcaatgttaattcgccttatttataaacactcatctaaatctgtaacctcaacagacaatatattaagctaccaaatgaggaattaaagttacattgagtgtgacccaaataggaaaataaagctgaccgcatcctctgcagtacaagatgtacagttcagtgtagacaacagtgtgggactctgcaaaaccaaggctcaacttgctgatcttaaagcagttatttcagttttcctctgccgtccctggatgctatgggtttaaatcactccctgtctttgtttagacctcatcttggaggcttaaaatagtatctcgttgacaagaatctgaggtctttcagacctaatatcacatcaagctgctaggctaagaccttacatgccaagtctcagcctacaatgaatttttataagtgagttataaacccctcaaaaacagggtttataatggaaacgctgacagactcttaactatcgagtttctagtgggttcctgtttaatatactgtatttcttccccttgaagatattaatttactttttgaaatgttcattgctaagattaagcataggtttttgaaatgtgttcataggcaatttatgcatgagtagaaatgtactcttctccagatgtacagaatactaatttgaaaatgatttataggccacaccgtactgtacattccattcccttctgaaaagttaagacaaggctttcctttgacataacaccgggatcccctatatattgtaaatacagtgtactagccagagttatttaaattcttgagacgtcaactctaggatgggtcagaatagaaagagtaagctgccaggaccaagggtatcagcggtaattaaaaaatgggaggattcaggaagaggaagattgacataaacacacattcaaatagaagcttctcatcttaagggagtattttcatgttttggccaaattagatcgcttagaattttagagtgttagaattgaatgaattttagaaatcatttaactcagatattgcaaactggtgtcctgggggccaaattaagccccacaatataaataataatcacatgaacaaaaagttgggattagatgctaataataattgaaaatgttcaccccaaaaaggaaatttctacttctctttaaaaatggaaagacttggtaacacttaacttgcatcttcccttagaaacaacttgctggggctgagtagcgcagccccctttagaacagaagtgagtcccctgcttgccaatgtccactcttcctgtttcacactttcatgtcaccatcctggttcctgatgtagtcatgtttgtgaatctcatccagagaatatcttgtccaggaatccaagcctgtctgtggcaggactgggatgaaagtaaggtcaaatcttacacattttcctcactgcactatcagcacattatactctctttggctaattcctttttgcaggaaaaatgatcctagtgaaaaataagttgaaagatctaataatcacagtcattggcaattatgacttcagtgactcttctgagatctaatggaactcttgatcatcccaaaaggtatagtgttttaatgcttgcaaaaaatgtttgcatcaaaatatgggctctcaaactttggttccacttaaaaatcacctgcagagtgtttaaaaattatggccaggcatggtggctcatgcctgtaatcccagcactttgggaggatgacgcgggcagattgcctgaagtcaggagtttgagaccagcctgaccaacatggtgaaactccgtctctactaaaaactacaaaaattagccaggcatgggggcgggtgcctataatcccagctgctcaggaggctgaagcaggagaatcgcttgaactcaggaggcggaggttgcagtgagccgagattgcaccacgcactccagcatgggcgacaagaatgagacttcctcttaaaaaaaaaaaaaaaaaaattaaacctaggtcccaccccagatttattaaatcaaaatttctaagtgtgtagcccaggcataatacataaaaaacaaattccaagatgattctagtgaatatccagagttaacaaacactggctcagagataatttatgattttattatatttgaatgaaaacattaaacagattttaagtataaaaatcatgtttaataaaaatgactttaaaagcagtttgaaactacttctagtaaacaaaatgatgatatagcataaagaacaaaaatatcttgaggcatagtgacttctttcctaaacaaaagcattataagattattcatagctaatcacttcatggtaatgtgctttcatcattgaggaagaaaggtgttcctaaaatagctgagaaataaacagtgtgcatataaatgtctggagaagcagcagggaaggtgcagtatctctgaaggatgacacaagatggataggcgttccaggttaagaatagttctcaatgtttcctggaaaggaattccatatcctcaggaagaagtgactatctcagaatatcccatctggatacacagtgggcggaagtcacatttacagtaagagttgaggttaagcagaggataagctataattaatatctggtaaaatcagaagagcagcagtcactgatataagaaactatttttaataatatagatataagaaaagatcatctaaaattttactggatagcaaggtcttttatttgctttcagaatcctggtggtacaggtttaaagatctaattttcttaaaccctgaaaaaactacatataagtacatatgtgtataaatgtgagaaagagtgtggattacttatggagacgaagagttacatagatttctaagaaaaggagaatgcttcctagtgcaggtattggtggtttttcctgatattctgtttcaaaggctcaaaaatcacaaatgatacaaaaattttaggtaatgtctcatgtcttctgttaggctccatcaaatgccaccttgttgttcaaaaggatagtttagaatttagagatgattttaaccaatattggcagtcccttagaaacttagaagcagctcttgttcccccaccacccactgaccacgctgacgatgtgaatgaaaacagaaataacatacagaatttcaactttcacacttgagcctgtataacaagtcagcactgttctgaaaacttaacttatgttatctttaaaccctataacaagatagaaaagtaattattactttacctctttacagataagaaaattagaactcagtgagaggaaggaatttgcctgctctcacacagctggcaacgagtctgagattcatgtctaaatctattccaaagctcttgacctttctattataacacagtcttagtcttctagtcagcaatatatatatatgtgtgtgtgtgtgtgtgtgtatatttatatatgtgtgtaaatatacaatatataatgtatatatacacaatgttatattacattatatatacattatataatatgtattatattatatatataatgtatagcaaaagatttgggtacatttattaaaatttgtggtacaatttgtgtgaaatgccttcactccagttatctgtctataaaacaaaagctcataacagcttctgtttataattcaagcagtcaagttactagtaaaggaaagacacagtgggatttgggtaataaataatgtcaatctaatagcattattatagatatccaaaactagtaatggcagcacttaggacatatttaggcatattttatttaaattaccttatatgttaaagtaaggatcaaaatatctgtgttagctaacaagggatgtgaaggacctcttcaaggagaactacaaaccactggtcaggaaataagagaggacacaaacaaatagaaaaacattccatcatggacaggaagaatcaatatcatgaaaatggccatactgcccaaagtaatttatagattcaattctattcccatcaaactacattgactttcttcacagaattagaaaaaactactttaaatttcatttggaaccaaaaaagagcctgtatagccaagacaatcgtaagcaaaaaaaaaaaaacaaagctggagatgtcacattgcttgacttcaaactatactacaaggccacaataactaaaacagcatggtactgctaccaaaacagacatatagaacaatggaacagaacagagacctcagaaataacactacacatctataaccatctgacttcaacaaacctgacaaaaaccagcaatggggaaaggattccctatttaataaatggtgctggaaaatctggctagccatgtgcagaaaactgaaactggacccattcctttcaccttattttgaattacactaaaattaactcaggatggattaaagacttaaatgtaaaacccaaaaccataaaaatcctagaagaaaacctaggcaataccattcaggacataggcatgggcaaagacttcatgatgaaaacaccaaaagcaattgcaaaaaaagccaaaattgacaaatgggatctaattaaactaaagagcttctacacagcaaaagaaactgtcatcagagtgaacaggcaacctacagaatgggagaaaatttttgcaatctacccatctgacaaagggctaatatccagaatctacaaggaacttaaacaaatttacgagaaaaaaacaaacaaccccatcaaacagtgggcaaaggatatgaacagacaactcaaaataagacatttatgtggctaacaaacataggaaaaaaagctcaatatcactgatcattaaagaaattcaaatcaaaaccacaatgagatattgtctcccgccagtcagaatggcaattattaaaaagtcaagaaacaatagatgctggtgaggctgtggggcaataggaatgcttttacactgttggtgggaatgtaaattagtgtaatcatcgtggaagacagtgtggcgattcctcaagtatctagaaccagaaatagcatttgacccagcaatcccattactggatttatacccaaagaatataaatcattcttctataaagacatatgcacatgtatgtttattgcagcactatttacaatagcaaagtcatggaaccaatccaaatgctcatcaatgatagacacaataaagaaaatgtggtatatatacaccatggaatgctatgcagccataaaaaggaatgcgatcatgtcctttgcagggacatggatgaagctggaagccatcatcttcagcaaactaacacacaggaacagaaagccaaacaccacatgttctcactcataagtgggacacagggaggggaataacacacactggggccagtcgggagtgggggtgaggggagggagagcattaggacaaataagctaatgtatgtggggcttaaaacctagatgatgggttgatagatgcagccaaccaccatggcacatgtatagctatgtaacaaacctacacattctgcatttgtatcccagaacttaaagaaaaataaaaacaaacaaacacaaaaacaaaaaacaaaaatagctgtaccaagaaacatatttctgaaaacacggcggcattattgttagctactctgtgaaaaagagctatctaatatgcaatagaaattagtaattgagtgacattttcactgacatgaaacagtaaatgaagggctatcaacataatcaagatcttgcaaatgtgataagaaaatgatttagggcaaaagaagctaatcagaagaaatagagatctcattctttctctctttctccctatcaattttattgagatacaattcattcacattaagtaggctgataacttttgacaaatgtatacaccatgtaaccaccgccctaattgagatagagagcagttccacctccccagagagctccttcatgcctcctttcagtttccccttttccacccaaccctaaataattattgattattatagattaattttcctctattaatcagtatagattagtttccctgtcctagaatttcatataaatacaattagagagcctggattctttgtgtccagtttctttccctcagcacaaactctaagagatttgcccattgagtggcatatatcagtatttcagtcttgtttattctagtacatgaaaatatcaaagggatttattctttcaactattaatggatatttgtgcagtttcaatgtcctgattttatgattaatggtatgtcaaacatgtgtgcacaagtctttttgtggaactattttttcattgcccttggataactacttaagagtgacttgccggagtatacagtaagaaacttctaaactatttcccaacgtggcagtaccattttacattcctaccagcaacgtgtgcgatctctctcttttgagatttttctactctcatggggcttgagaaatataccctgaggccttggacatgatctcaatgatgagattgattagtaaaaaacaaaaagaaaaattaaacacacaaacaaaaacaccctgctacatattcaccatctcaattatttggatggtgtatctgcttgtcttctgctatggtgctcactccatgacacagaagttagtgatctcctcattcttctgtggtcttgtcaaattgaccatcaatggtctctgaatctatcttcttcagtgatattatgtgccactgaccaatacttctttctttaaatatgctctttcacagatttgcatggctcaaactttctaatttgcttcctatttcacagacagtttctactccatctcctttactagttctttctctcagggttgtagtttctgagggtttcatgttaggctgttttcctttctctttctgcactgtcttattgagatgtttcatccagttctagaactttaaagatcatttgtgttcatggctcccaaatttatatcctcagtcttgacctcactagacaaaagtccagacctttgtatccagttgcctacttgacatctaaatctggatgtttaatagctatctcaaatttagtttccttagtacggaacttttgaagtaccctcctccctgcacactcctcaccaacacactcttttctcagttgcctctatccccaaaatggctccacctgccatctgttttcccatgccaaacatctgagtgttattcttgattttttcattttctctatctgcattcaatctatcagaaagctttcaggggattctttctactctcatggggcttgagaaatataccttggggccttggacatgatctgaatggtaagattgattagaatatatctaggaactacccacattttttctctctctccttccactacacttctcaaaatgatcgcttaatgcagcagcatctccaggaataccccacaactgcttctctcacaacagccagagtgatcattagacaacataaatcagatcatgccatcccctgttaaaatgctctgatggctttctactacatgtagaataaaactcagacgctttataccatgacctgaatagctctaccatactccaatgcctgcaggacagaggctgtaatcagctgtaatgtcaatgaataaaagggagaaggtaaaaaaaaaaaaagctaaactgcttgtaaggggaggaaatttaacaaatgactacttgccctgtcttttaaaacaatgtgaagacaaaacaggcaacacaggcacatctgtaacaatgttaaatctattccaaagctcttgacctttctattataacatagtcttggtcttctagtcagcaatgtatatatatatatatatatatatatatatatatatatatatatatatatgcaacaaaagtacactggctacctccactttgtcacctctccactaccagttctagccctcacctagcctagtaatctaattgctcttactatgctcctggccttccttatgttatccaaatatgccaagctcctgcttgccttgaggtcttcacacctgctgtggcctcttcctggaatgctctcctgcctggttttcacaccagctcctcctatcattcagaccacactcaaatagcactttttcagggaaccttctctcacctccacctttaaagcagtcccctcattgtaactattatcctcaggcatttactgtttcatgtctgtcaaaatgtcacttgattactgtcacattacccccactttgttacttcctctctttcttttttattttttttaatacttttcactatttgaaatttacctatttatttactgacagaatatcaattttcatcacaggaaaggaagctccatgagggcaaaaatagttatctctcttctttatacttgacttgcatcctttaggcatgttgtaagtgcttgaaaaatatcttttgaattaacgagtctttatagaagtgaaaaatatgcatgtaaaaagtagagttaggtttggctccaaactgaaaagtgttctggaagattacaaaaagcaacgaaaaaagaaaggaatatatgagaaattagataatttcatcatgttttggcttttttgcaactttcttttcttttcctttgattaaaaaaatgtttataccatgtgaaatattcaactttttgctccattttgactccatgttctcaacttttatcctattaaaaaagtgttatgggggcccattttcaaagagggacacacctaaataactccaaacagatgagcctgaaccagttttaaagatcataagagaaagaaatgccataggctttttggtggctttaagtttttctttttaaacaaacctagctggcccttaaacagaaaaaatcggcaaagttatgttttggtactctttaaagactgacctgactttatgaatattttaccaataatacaaaattaaatcaatatatttgcccagagaaaatgaagtttttatttgaaagaaggccctaaaactaaaccagaagtttccgtttattttaccaactgagaccctgacttgagcagtaaacacttcctgctcccatggctgaagggctatatattatctgaaataatttctttagtctgtgactggaggaagaaaagtgacttgcccttatttatcttttttaggggctacatggattttagtgtccttgaaaacaagtgattgagaacaaagaattagcaataatacacatctgtatgataccattcatctaaagatcccaaagctttcttgagtgtctacactgcccccatctttcaattgctaaagcattttggtttaagacaggcaatacagctatatttgttcccctttgtggctttgtaaaagccaactttttttttaaactaacatgtatgaacatcagtggaaattagcaggcctcactcagcttgtagaattagcggtagaaaagagaactaaactaaactaaaagaactaaactaaacatagtggatggctgatatatacttgccaaattcaatttaattatatgatcaggttttaatacaaatagaaaagacatatttgaagggacacactgatgtttacaaacaggaataatggagcccaggagtgtttaaaaaaaaaaaaaaacaaactcattctaggaaactccattttgattaaaaacaaattcgtaaatcatttttcagttatagctttcagaagctcttggttagaattcaataaggcaaaaagagttttggtttagactttaagtcattgagtaccccaatactaataaatcctgtaaagaaagtaattgacaatgaatttttttaaatgttgcagtagatgattctgaaactattcatttctacctagatttttaataaacatatttttgttaactaagggtgccaacaaactgattattattttatattacagcaaaattttctaccattaacataaataagtctttaggttttcagaaaaaaaagttctacaggattatatatttatatatgtctagtatctattttatatatataatctataggattatatatatctaaatatctaatatctattatatatatacaaaatctacattataaatatatatacatatatatacacacatatatataatgtgaataccctctgcaaaaatcagagcatgtgaagatttagaaaactaaaagcctaaaagcccaggcttttcttatagggctttgaaaatagaaaggcagttgttagaaaatcagtatcatttattgaaagtagccatgtttgtttaactttattttatattccactctattccttgcacaatattcctcagattaaactcctccaaaagtaaagaacaaaacactaatgtgaaaaaaaaagccttatgaagtattttccaggagactcattgtcttttttttccccctcctctttcctttttttttttttttaaaaaagcagactttcttcaaaagaagcaattttacatggtgtgtaaaaccgaccttggacaagaaatggaacacaaagataaatcatttgtggtgaatttaaacatgaatccgtggagctcctccttttctgaaatcctccatttcttttaaaacattctggtaataaattgctgtgagtttttgccatatcctatgtccttactcactgggaacaattgatgcttggaacccattcaacgatggttacatagatttgtgaaaacaggagccggctcagctttcctttaagagttgtttagtgaagttatgctcattgactttttactcttattattaaaattcctcattaaacctgcctgaaaactaaatgtgattccttttacctgatgtggcaaaatcaccctcaccccttccagaaccattttattacaaaagaacaatagatttccttgctgggtaaagtaagagcagtgtgactaatgcactttctatcctacagaaggcctaatattgttaatttacaaaatcaattcaagggaaccactttgaagacaaactagggtcgtgcatatggatctctccagaaatgatgtgtcagttccaaggctggcattccgcctcagctggcatctagcagttttcgctcttccaggcaatttggcccttgatttcaaacaaatgcatcctgaaggcctaatgccaggaatagtttgatatgatttatgcttcatgttttctcacaacccagaaaattttagacctgaaaggcatattttttcattatttagcatttgccatgagtcgtatgtaagccaaagttattttagtgtcaacctttatttttctggacctctgagtagagtcaactcacgagtgtttccacgtcttgtttgttgcacaatagggaagttttctggctgctttcattgatttccaaatcccgaatctttcttttctgatggtatgatggtgaaaataaccttatttggttgccatcatttgatgtcaaaatgacgaccatctaaactactttttttctcactaggtttactcttttaaccaaattcatagcaactctctcttacttatttcaagcctatgggatagaaataagttgtgtcatttctagtggtgtttaggcataggtgtatcttaaaagcaatagttgaaaccttcccaaatctctgaaatgacatctgaccactggctgccaggttgcaaggtcttctggcttcccccatttcctgcatacatttttgctatttctgaaatgagaagaaataaatgtactgctaatttacacaaaccttctctagtaaaaaaaaaaaaaaagtacactataggttaaaaaacattaaatattactaattctatatgtttcaatctagtacattaaaataatattcatgaaaacactttacaatattgggggaaagccttgtgaaatttcacaatatattgttaagtaagaaaaatagtttataaaattatgaaaatgcaatcttaattttgcaaaagagatatacagatatgcatagcaaaaatactgtaggtagctcaataaaaagttgacagtgtttatctgtaaaacaaaaacaaaaacaaaaacgcacattaagctatcgccgtggccaccatttacacggagttacttaaaacagaataaatatattaccctataatttaagtcataaaaatctactgaggaagtttagtctctactagccacacaaataaacaggtatgataccatagagaacaaccgacagataccccatctctgtgggttcattttgacttccttgcacaagtaggtaacaggagggtggatgatccgcagatagccagagccatatatttagaagatgaactcataacagaatgatctggattttggcacctgagtaaacatgactacatgggtttgtattaacttctatttgacattcacagagaattcccacctcttgcctgcatacatgaactatagctagactcttggagtcttttttttttaataaaacatttttgtggagacaataaaatatataacacaaaggaaagattctgatataggattacattttgggtttgtaataaactagaacattgtacttaaagataacactgctcaagttcagaaagatttttaaaaagcaaaatatttagcattttcgtaaattatgcacaattaacataacctcactactatatacatgaaatgtttaaaaataaataaataggccgagcacggtggctcacacctgtaatcccagaactttgggaggccaaggcgggcagatcactgaggtcaggagtttgagaccagcctggctaacatggcaaaaccccgtcgccactaaaaatacaaacattagctgggcactgtggcacgtacctgtaatcccagatacttgggaggctgaggcagcagaatcacttgaacccaggaggtggagattgcagtgagctgagatcacaccactgcactccaacctgggcaacagagcgagactccatctcaaaaaactatatatatatttattttacatattttattttacaaaataaaatatatatgtaatatatatatatataatccccataatttcaaaatttataaaaatttcagcatagggtagtttttctcactcatctacaaacataatcagaatttacaacatggccttgacaacaattttattatacatcctaaattatcagtgactctaattaaatattttaatagctctatagtgaaattaatgcttagggcagtaatcatttgactactataaatcatgtaaagctaaaagtttagcaatatagcttataggttgataatccagaagagaaatatatttttattttaatgggaagagacatcttactgtgtgcttttaaaataaattaggtttaagaagtctacaaattctgaaaagttacaggaaaaaaaaaggatccattaatcaaaattgtgtgacatgaaaaaatttcatttttcagaatgatctttaagaagataaaactttcaacagggatcacaagagctgggttgtttaatttgcagtagaatttttgaaatctggaggaaggatgacactcaaatcagatgtatgcacttgacttgtcaatgtaatggaaagttacttcgggcaatgatcccaataatgccacagcttgggtgggaagtttacaaggaaaaacaggaagtgatgccagggatcacaaaaggacacttcccttttgactggaatgagtattttacaaatcaaggagtgctatgcatccagggtgaggcagggggaggcagagtgtctctcagaaaagcctgtaacctgtggtctcacacagtgacttcagaacttgtggaattttgaatactgtatccaattaggaaagtatcctttttgtgttcacatactacagaatgcagtccatatcagtgttaacttttatttcttaatcattctgtattaggcatcaaaaagcctactactgcttgcccaaaatcattcagggaattaaaaagttctctctttacttactcttacagttttattttgacagacaatgttgcaccgtatccaatttaaatttgtgatgacagtggatttgggcgtgcaaatgtgacagagaactttctctttctccccctccttctacaccacacacctacccctacgtatatagctgcgtgtgtgtgtgtgtgctgtctcctgagctatgtcatgatcttggatgtgtgtctgtggggccccagtgttgctgctgtgggctttttgcaacaactataaaattcagcacattatcctcatctcgctataacagcaaacatcgaagtatcacagaatcaaaggaattagttgaaaataatttcatagacagaggtacttagctttttatagctctggctcaacttgaatatcaatctatattaggtcctttaaaaaaaaatttaataggccaggcgcggtggctcacgcctgtaatcccagcacttcgggaggccgaggagggtggatcacgaggtcaggagatccagaccatcctggctaacatggtgaaaccgcgtatccactaaaaatacaaaaaaattagccaggcgtggtggtgggcgcctgtagtcccaggtactcgggaggctgaggtaggagaatggcctgaacctgggaggcggagcttgcagtgagccaagatggcgccactgcactccagcctgggcgacagagcgagactccgtcttaaaaacaaaacagaacaaaacaaaaacttaatgagatcattcctaggttagaaggtaaacttatagctaactttcttcttggcaaaaaatcaggatgctatatatacaccactatatatttgagcacacacatgtagctacatatgtaggggtgggtgtgtggtgtagaaggagtgagagaaagtctgtcacacttgcatgcccaaatccactgtcatcataaatttaaattacatatataggtgtgtgtatatatataatggtatatatatattatatacattagtttgctatatataataatagcatgtgtatatatatataaaatcatcctaattttttatcaagaatacagttaactataagtttacctcctaacctaggaaccatctcattaagtttttttaaaggatctaatatatatattattctaatatgtataattctaatatataatatattccaattatatacattttaacaaatataaatataagtaaataaatatacattttctaactatatagttagaaaataagactgggcacggtggctcatgcctgcaatcccaacacttaagaaagctgaggcaggtggatcacttgagtttaggagttcaagatgagtctgggtaatacaatgaaaccctgtctctccaaaaaaatacaaaaaaattatccaggcatggtggtgcacactggtagtacagctacctgggaaggctgaggtgagaggatcacctgggaggcagaggctgcctgcagtgagctgtttagtccagccagagtgaaactctgtctcaaaaacaagcaaaaagaaaagaaaagaacacttacttgcttcttttctcaaatattgccttttcagtgagacctcccttacctaaaatttctacctgttcctcccacctgctaacacttcatattcctcttacctgctttattttatctttcttgcatttaattttatttttattattattttttgagatggagtctccctctatcacccagactggagtgcagtagctcgattttggctcactgcaacctccgcctcccaggttctagcgattctcctgccccagccccccaagtagctaggattacaggtgcccaccaccacgcccagctaatttttgtatttttagtagagacgggatttctccatgttggctaggctggtctcaaactcctgacatcaggtgatccacccacctgggtcttccaaaatgctgggattacaggcttaagccaccgtgcctgccaataagctacacttttttcttaacttttttattgtcttttctcaccagtagaagagaaagaccataagggcaggaatttttgtctgtcttgttgactagtgtatttcctgaggctcgaacaatatccggcgcatagttggggcttaaaaatcatttgctaaatcaatgaataaaggaaggaaggaaagtaggaagaaaatcgaagaagaagattagggaaaggcactctatacaataatgtttaaagatgtaattctagaatcaggctgtttggatttaaaatccatctatgccttgtattggttgcataaccttaagcaagctacttacactctcttctttttctcatctgtaaaatgggcaaatactggaactatcttgcagtgttgcaaagattaactaaagtaatccttacatagaatttagcatcatttttgaaacaatatgcagtaaacaaatgttaactaatagtatcatcatcatcttcttcttcaccagaactatcacctttgtcctaattttatgaggctaacattagataacagtcattaatggttatttttaaatacttcggtaacattttggagtaaactcagaaattatttcaatttccctttacatacttctatctggctacacaattaccctagcatccaaaaataattgtttcctgccttcccaccttcttttgtgaaagagtgtgaattgtgtgcccagttacctttagcccccttggacccatgggctttttgctgtactcaagagcacagcttttggagacgtaaagagatgttaaaaaaaaaaaaaaaagccagtggcagctcctggaagtcactctggtctggttttgaatgggttgggctaagtgatcactaagaattcatctggctgtcaaatctcacaacttttggctgacgtgtccttcaggaaaagggcagcaagaactggtaaaatagaaaaaaaatcacttaaattgcttgcattcatttattcattatctacgtatccacttcattcactcgtttatgcatcacttgcttctaaatatttttaccctgtccaaaaggcattatgatgatacaaaggtaaatcagacttcagctctgtcaccaggtagtttggcctttccactatggcaccaatgaaaggcagactagatacctgaaggaaatgcttttttgttgttgttttctgatattctagtcttacattatagttgcgccatcatgtcactatttaaattttaattacttaaaattatcatttccgtagatcactagctatgtttcaagtgctcaatagccacatgtggctagaggctaccttactggagaacacagacagagaacattcccatcgtcacagaaagttctatgggtcagtgctgtgccacagaatatgagttactcatcaatttataagtggtaaattattttctgaggtccaacataatctgatattagctagctaattaaagcaaacttaattgaaatggcaaacaataatcattagcagagattcagaattagtttaaaggtagctatggtttcgaaattaattccaaacactggctgccctcagtaccttgttacagcctcttattcctgccattagacaacagtgaagcccacatatggtgccctgactggtcacatgattttttaatatccacatgatggcactaaaatggcctattagatttacagtgtcattaactttccaaaataaaaatgagagtctgctctggcagcggggaaaaaaagtgtgagtgctgttgggttttgggtaaccagtctatgaggaaatgctgacaggggtcagtgtgacatcatctttcattcagccccaaagctgtcaggccctccccagatgtctgaaacgcagatataaattttcattatccagcagcaaagggccagaggtacaccaaatgaattttttaccaatcaaattatagctcattgccagattaagtgtaaacactaattttgtgaagttttcttctggtcatttatctccaactccacaaagtaaccttgctgaagctggaaagacttctagatcaaattatcattttcataatcttgttgcagacactgcaaaattgaataaaaggaaattccattaataatgaacggtgccttctttcatggaacaattagatttttttcacattttctaaaagaaaatgcaaagtgaggaaatactaagggatcacagaagaaccattctggacctcagtttccccatctataaaatggtgagactggatacagtaatcgctaattctgtggtataagaatgactctaagtatctctgctttcatactggcaaatttcattttcaaagtcctatatttttttttttactatatgttaagttctagggtacatgtgcacaacatgcaggtttgttacatatgtatacatgtgccatgttggtgtgctgcacccgttgactcgtcatttacattaggtatatctcctaatgctatccctcccccctcccccctccccccaccccacaacaggccccattgtgtgatgttccccaccctgtgtccaagtgttctcattgttcaattcccacctatgagtgagaacatgtggtgtttggttttctgtccttgtgatagtttgctcagaatgatggtttctagcttcatccatgtccctacaaaggacatgaactcatccttttttatggctgcatagtatttcaaagtcctatatttttaacaggaggtttgaagataaagtaacttccaattaaaaaatgtgataggttataaagttcaactgtgtatttattgctgggaaattagaactcatttcttggagttagaaccctgggaaataatgtgacaaatggtatagtttgtcctagttctactttaatgtaaaaagaattacagttatactataatagaacaaatactctattattgatagtaatagtactacaatatccaaccacttgatttaacagtatgtacataggaaaaggtattcatgctttactctgaaagtcagaaactccatctcctctgatttggaccgtgagcccctctattcttcctcaagttccaagccactagtagtgactcccatgacctcaggtggaacctcctgtaggttaagtgcctggccaagagaagcagagcaacctggaactcctgccattattaaaccccaaaagctcttcacaagaaaaggaagagtgcttcagaatttttttctgagccactggaatactctagttgactaccgtgccctaggttttttctatgccccactgacgggggtgcctttcatctaggatatggtgtggtatcgatactaaggagtatgatggggagctttctagagggtaagagagaaaataatctgagaggagatagagaacgtcagctcctgctgggcccatttcaagccttccttcccatctgcccttcatcaccaacaatactgttactgtgttctaaaggggccaaggagtatctgtggaagaacaaaggcctggcagtgatagagcatgcaatactggctaagtggatggaaattcaaagcaatggcaagaagaagtcttgattaagctgcagtggtcatccaacacaacgtaaacccaaatgagttgttttggtgtttgaatggcttgagggggatgccatggcttcctagggttctcaaaacgcagccccaacactttcccaggccactgtcacccacatatagaaaagtacagtgctatcctgagtctatcacttcagtggaatatcctttccttcagtcatcatcttcagctacccagtaaacctcacagtaaaaactgagtggccattggggatgggaagaagggaaagaaataattctccagttttcacaaatactgagatagctcattgtttgtagtgtgacttaatttttgaatagttggcctgagtttaaaatgtatggcattcattatccaccagggactgagaagcaaggcaagggggcccgtagagaatcaagaaacctgaaaagccccatgggctgtaagaccatccagcacttggctaacagtgcaacaatctgttgagtcgagcataaacgaaggatacaaattagatttcccctgaaagccacaagattaaacattagggggcaagttcttggcaaaatgtatgtgtgtattttccaaaaccaatcttttttaaaaaaattcacaaagtctgctaaatacattggtcagatttttctcatacttaaatatttacctaacttaaagaaacgtgattttcaggtatgtcaaagcagagatgatattgataatgctaaccaatttattgatccagagggctccaaaatgagttttatagagaatatatttagtatcattatgtgaattttagcataagatctacttaactatgtaataataaaaatatagacactatgagaaaaatgttaaatgcatcctaaatacaagtggagagctattcggattttatgttcaatatcccatagtctattaagaactaatgttagttaagtagagattctgctgccctggctgcttagagggacatgtctggacttgaccatatccaaaccaatggggatagagtggtttgaggtgggccaaggagagtcaggatgattatttgtgacttttgaagcacatatgagaaaagaaaccctgtcttatcaaggactggtgatcttagctgtatcttctctcaaaacaccctacaccaaattcaaaaacagggcccatacccaaagatattctattctactttcttttcttgctgacaaagatgaaatattaggcagctcgtcctaagacccttatttgtttgcttgtttgtttttacactgtcttgctctgtcgtccaggctggagtgcagtggtgcgatctcagctcaccgcaacctgtgcctcctgggttcaagtgattcttctgcctcagcctcctgcgtagctgggactacaggcatgcaccaccacgcctggataatttttgtatttttagtaaataggggctttcaccatattgaccaggctggtctcgaaatcctgacatcgtgatccgcctgcctcggcctcccaaagtgctgggattacaggcgtgagccaccatgcccagccaagacccttgctttaagggccacagactggtgcgggaaataagcaacccacaaagagaatggcccaaaaactatctgtgaggtagaagaagagaaatcagcaaaggactccttattttattacataaacttccattgtctctttaacattctttaacttaacaaataatttctgagcacgtccccatcttgcctaacctagatggtcatttatctccttgttctcttcaaagtattctctcaccacccctgcctcacacttcttttttaatgctggtgcaaagaggtaaaataaatattatgggtaaccctggatgcattaaaggtaaccttgaacactactgttagtcttcattatatctaatatcacctgaataaaaaaagaataagagtagaagtggagtgtgagtttccacaggacctatagtccctcagaataagtttttctaactattatagagatgaataaaggaatttataataactgtatatgaagtattttatctatttaaactttgtgaattacgtattatgaatttcataaactgtaacaatacatcttttctggaacttctccacattggttctaggtctggagatgatatttatcaaatatttactatgggcgaaggaagtacagttattctccccgttttatttatgagaaaatcaagtgacaacttgcccaaggtcctaaaaccaacaccataacacggaattaaaactagatttgtttccctttagacatctatataaaatgtagatgtattctctttgttcaagagattataaacaatgatcaataatggaaaggggaatcaaaggagttcttcaggtttcacttacagaggtcttacataaagtgcttatcaactggaaggaatttaactgactgtgctgaatctcagaacttcattaaaagcagttctatttctcccatgtatggaagaaaattttgcttttgttttttgtatacagggcaatggcaggagaatctctgaaatcatttgatttgagagtagatgttcataggctataaaaggaaatccttgccctatgtttaagaggtgtctaacttcacccatctttagttttttcattgtgtgaccttaggcaagtcattggctggacaccacagcttccttttgtgaaaaaggaatcttcgggcaatttagtcaaactcactattttataaaatagtcatggtgatggatttctagagaaaggtgagagcaggcccagattgtacacagtactaatattagcaagagctcactaatgggaaaaaggactagatcatttttacagaacaacaaaataaatataaacatcttaccatctgagaaaaagcaaaataaaatacatactttcttcataatattttgattataaaatatacccagagagagagagagcaggtacacatataaataaattctgaatatcataatccttacttttaaaattctgtctcctacctgttgtaattttggtataatatcctatttttcctacaccagaaatttatttgctaaatgccctatagagtaaatgtttctgagaattctgtatagattttcttttctctgtatcagatcataaggattggtaggtatcagtgggatttgttttctggttatggggacagagatctcatgaacaggctttgaccccaaccatctaccacaaagtagcacatttgagctaaacctttgcctttcctgaatggcaggctggacacaaacttttgcccaagaaatgcgttggaaagggggaatgggtgaaaagtcattgatatagatgcagaactgtgcaaatcatggaataaaatgcttgttttaaaaaggaaacaagattagaaaaatgacaacatttcaagaggcacattcaagatgtgttttcagaagtgggaatcagcacataggaggcaggagggcagcatgaccaaacttgggattttgttgctgtgaaagtgagcccaaaacaaagggtgggtatggagcagtgtccctgatgggaaccattgttttctcatccgaaagtctttctcccacagcccaagaacaattgagacaaatacattcaaaggtcaacagaacagacaatgctgggaacgccagagaacctagtagctagccctgtgctctcatcacaacagacggaaccaacaacagcccaagtagctacaagcaatctgattacaacagccttgcagcgttcctgagcagtttctgtggtttatactgagttcctcctctactgtagtctgtgccgcaaatctaccacagatttggctaaacagatgattttcttaaaaagaattatctctggtggttttgccatattccgggcaatactatactaaacagtcataatggaaatactagcacaagacctgttttttctaagctcagtgcaatatctgctgccacttgaatttgatcatttaaagtcactcatgatgcaggcgtatgttacgatcaaagactaaaaaggaactgcaaagcaggagaggacagatgaccatgcttttataaactacagtttatgcaaaaaccagtttttcacggggctttaaaaaaggggagttgtattttcgtgagactacagtagactttttcaagaaagtagtgtattaaaaataaaaacaggataaaaatagaaaagaaatttatgaaggaaattcagagatgtgattataacatcacattaatgacattacaattaacctcaaaggcatttccatgcaaacttccccttccaacgtaagtcactccagccaaggaataatcctgtcaggctgaaatactgcatacttggtgtgagtctaaaagtgtttcggctttcttcattttgtttttattgccaagttggacagcattagacggagctgttctggagttagaaggatacaatagtctgcagttttaaaagtttaaggctttttatgcttttaactcaaacacaccttttaaatcccaaattgggccactcttggagctcactgtatgcactgatattttggctcactgggtgtgataacaatggacacagtgaagatgttattcaaagcttttaaaataaaacacaaaaacacttgataaaataatgctgattatatggcccaagcttttcacactcacatatacatgagtgttaactgcactggcttggaaacactggttctggctttctagtcaatggtccgtttacttacagtaaaatcttccagaggggttccataaaaatctgctctgctgtaaagaaaaggccaaccttaccaactccttatacaggaactgaagagattccttaggcctgttgggactgtgattaagtttagctagaaagtgccatccacgcatgtgagatggttggtgactaccaaacgggcaagtggagaggcagccagcagacaccaaataagtcacaagagcatctcaactaaaatttctgaacccaaaggcttatgagactgagaaattatattctctggtcagtcatgaaacttgctgcttggtcttctgatcagagtttccagggactggcaaggcttaatcttaaatccatggaggggccgaggttactatcctgggtcagtgatggtcactagccagggagttaggtgagggtccttagagatgaaagaggcccattgagctgaatgaggtctggattctggttgtgaattctgtttctactactttcaatggccctggtcccctcctgcaggtcatttttaaaagctaagcccaaagtatctgagtggcttggataaggtggctactgtgaatatgccctcaagatagcactcatgagtgtgagattctctgcacttcagaagcctctacaaccaggtgctattatgctttaaaacacactaatataagagactatgatttcctaatcagtttcatgggttatttctctattctttcagctacaatgttttttcatgtcataatataatgtgggtaaaaaatacttgcaacatcaagttgattaaaccaaaataaaactaaacaaagaaaattccaaataaaggaagattaaaaatgccaaacagcagacttaattgcatttttgagttatctttctttactccaatgtcaaggaagaatacttcagggggctatttagggataatacttgaatatacaaatactctctttggatttacttctatgtttacaaaaaatttctcaggtgtcttgaggcagctacctcttctcataagccactaactcctatgttcacctcatttccctccaggccagaactttgagacctctgtctaccatcttggcttttctctaaatttcctcttttagtgccaaaaagaaaaaaaaaaggttctggattgcaagttccctttatcaacttagccagcttttttctttcttgagatacatgggatatgaagcatcttgcctccttgatgttataataatgcagtgatttcaacttatacagctgaccttagcttttctttgagataccaggttaaaagtgggcagattttataaataggccagtcttcctaatggaagtttgaatgtatctccaagataccagttcattatgacttaattctcgattttgttattgatttattaaaaagatgcataacaagtatcttttaaatatcaagctctaaagtaagttttctcctctgaactccaactcacacatataactattttctgaaatggtttaattctgctctgaaagaacccacagcagtaggaataataggtttagcctcaagatttctgctgaagagcagaaaagaggcttctacctttcatggcccatggtctgacttttacccaagcctacttcaatttttaaatttcctagatggtcattttgaaggtcaatcattggttcactttcacaatggagaagaatagttgccgcaacatacagaattgtttatcttgcccccattcccctcacataagatcttcaatggttcccccactttatcataactttgttattatcaaaataacaacacaaatagaaaatatattgtctttttaactttcacttttattaacttgccattcatagacgtttgtttaaatactctctcttctctcatccttcattcatcataagaagcatgccctctacaaaagattcccaaaatattcttggtggaaataaaatctttgacaattctggatgttattgcatctatagtcttgatctctccaatttcttacaattgtagtctttttctgtttttccttttgttgtgtctattgaataaaattggaagcttctcaaatgtagtgcatgcataaagtaaacatgttgttcattctttcatttattcactttttcattcatgcattcattcacccataaaacatttattcaacacctacttgcaccagacaccaggctaaatactggggataaggaagtctacaagactcacaagtttcttgactttcaggaacttatattctggcaggacaagaagggagaggcacatcataacaagtaaatgtaaataaactaacaagttacttacaacctatggtgagtgagatgaaggacatttttaaaaaataggatgatgaaattaggagaaaaagaagtaggaaacttcagacagctatagtcagctgtagtcagagaaaacagctgtagtcagagaagtccctactgaggaaatgatatttgagccaagacccaaaagatgagaatgagtcttccacacaaaaagctagggagaagcaccccaggaagagaaatctttgaggaacagaatagaaaccagtatgatgaagtcatgaagtgagtgaggggaatatcaggaggtggaagacaaatcatacatggtcccatgaccagaaaaaaaaaaaaagtgaatattatttcttaaagcaagttctcaagattttctaattcattgtttaatgaagtaatatgcaaatgtatctacagatcctatatacttggtccagttaagacagtgtcccaaagtttagcagtaggggcttttaccttctaagctgttagtcctgagtcttttcagcatcaaacatttgagactggatgatgtcactttaagccattcttgtacaagttctaagcagcccaacaccatcatgaatggtacccattgccccaccccaatgcattaggccagaataactggccagcacagctagaaactctaaggaacttccaaagccttttctcctttctgatcacgtgagaaggcatttagtcctatggttctgtgaatttctcacgtttctcttaaattcacctttttgagatattctaaactctggtgggctttctaaaagatcataccaaaaattaccattttgaggccattctacaacaaaagtgaaaaacgacttggacccaagaatcatgtcttttaaaaatttccagctccaccactgttacctattatttgctgttcttccaagcatgatataagcaaaccacaaaaaaagcttttgttaggaatcaatttaatagctgaaaggttaatcttaaaaaagaaaaaaaaaaggcagggaagggagacacatcaaagaacttatgtattgcaactggcataggaatcacagcgagctgtgaatttggagagagtaacatcagaaacaccaacaaagagttacatgtttacaggaagaaatgagttgcagagggagtataagacactatggccccattttacataggaatccagtaaccatttgtaaaatatatatatatatatatgtatacacatatttttaagaggcagcatgtaaactatgcttgtggtgcagtttgaaaatgagaattttttaaagtaaaattcttgaaaatattctttttaaccacaccattcaaagcttcagtgaatatttgattcaggccccaaacactgtatgttgccagtttttctcagcttaaactctagtgccaagctgattttaacaacctctacctttataagcagccttttcatgtatatttacttgaaaatggcatctcagcctcttgtcacctcatgttctcttccagaccattcacccaggtcagtttcctggcaggtccccaacaagcagttgggggttcttcgtagaccgagcttggagtaattatgctctataattgtggagtcagggcctgtctcccagtcaggattagaaatgccaagtcatttcctgttttcaaatccaaaagaaagatagtgacgtctgatactggttttcctatgtttcaattattgtggggcagcctggaactgcctttgaaggattctctttagaatacctgggtcccaaacatggtgctgtaccaacaccagagaatacagaacatcatcctagctatcttatttgataattcttcaggctatttcacccaaattgtggcaatctgggtcatgcggtatcagaaatgtcatctggggatgaactacttcttgggtgctttgtagaaacaggaggtatatgcagtaaaatgggggtgaaagacgtttggcacatgttaaagggtaaagcaccttctttttaattgtacagatccttgtattttacagcacattaaactttaaaaggaaaggtagcaaaattgagcatctgtttttttctcatataaattcaactcctaataaatactaagcagagtttccttagacccagttgtgcgcagataagcagttccatacacacacaactaattgcagcactctctaaagctcactcgactgtcttttttatttctctgccagtgaaaccagcttttagcaattgggttttgggaaagatgacatcccaaaaaagaaccatagccaaaataaacagggttaagatggagaatactactaaaattattactgtttattccatactacagtactttccattgtaaagagcatgctgcacctaaattcgtcacagtaacatgattttcatgctggaaatgaacctgtgcatgtctcccaatttcctgactatggaggagtaaaatatatgttgctgcttatcagttttttaaatgaattacctttccataaccacttattttacttgaaagtgacacaaagtctataacatagtagatacggttacaatatgcctgttacattttatagtgacagctgtataacttttaaaaagtgaaatgtaaatgtgtcccttcaggtcaacttcttatagaaatgtttatggtataattttattcaaagagaaatatgagacagattttttggagtggacacacaattcctaccatggaaagaatagaaacagacctgaaaaggctgaaaaggtgagtttctgcccacccccacagaggtactctgtgccattcaagcgatgaccactgagaacgatagcaagggtcagttggcccctttctctggtgctttctttgattgaaaaaaatcagtattttaggttctatcaagattcttcagtacttttaagttaagcagattgaattgaaccatccatttagtcaattatgtcattgagcaaatgatggaaagagaaagaagactagagataagggagacatataaaagcaatttaaaaaaagggaagaaaagggaaataaaagaaaaaagaaagaagggaaaaaagaaaaaggaaaggaatagccatgtattatagatttttagctgatttaaaaaaaatctggtaaacttactaaagagccttcaataatttgagatggctagagtgatgtgtttgtgtgcaaatcatttatttgctattgtgtaagttaaaacagtagcccagcttccacttctcttttgtcattggctgttattcctggccatatattttacatgtcaacctgctcaccatatgtgtacatacttatgctttctttgccactaattgcttctttttttgacaataccatctatatgtgcatagtatattgctgtttttatcactctaagcctattaatgcccagacttatggttcccagaggaattaaaattaaccagctctctaaatattgttcatgagttggaaaactcctgtattttagaatctcacttcagttgtttttaattggtttgcaatatttcacccttcagggcttgcccttagcttttcaaagtatatatttgaaaaaatttatgggcgtgatatgaaaggcaaaacttaggaaaaataaacacttcttttggacaacgacagtgcttacgctatgatttaaaagtccaattttatagtttggtagagactaaactcttattgacttgccactgacttctattatcatcaatgtgatttttacttgtaaataaaccattctaatgtgctctatgagaaaaaaagcacaggactctacataaaagcaaattctcttttgttgaattcctctttttagagctggagatccctaacctatcattcatttttttttagtttgtcatgaaatgttgctgtttatttctagaatatggaaagagacttcctttaaatgcttggcttttgaagaatggtcactttgtatgatccataaagcaaatcactgacaaaatgtccctaagtcccaaagaaccatttattgttaatgacaaatgcacatgcatacacacacacacctctcacatatgaaaacgtgtttactattcctgaaaaataaaaaaggaggaataaataataaaaaagtaaaatttttgaggaatgaaaaataaccaaataaatgatatttcttattctttaaaattaaagtgatagactctatggataaatgaaaacatatctaaattagaactacagacttccctgtttctctgttactagggcagaggaaaaagtaattttcttcgcacacacaaaaaagataacataatagcaataatatcatatttatgtaaaacaaggatcgcttatgttttcattctcttagttccccaaatgacaaataattactatctcccaaatcataggtcctggaatcaaaccattttgcttaaaaaaaaaaaaaaagggacagacgctccttgacttatatgattcaacttacaacctttttttttactttataatggtccagaaagacacgcattcagtagaaactggatttttttgaattctgatcttttgctgggctagctatatgtggtacagggcagcaccagccagccacagcctccagtcagccacatgatcacaagggcactgatggtctatagtgtactgtgttgccagatgattttgtccaactgcaggcaaatgtaagtgtcctgagcacatttaaggtaggttaggctaagctaggatattcagtaggtttggtgcagtaaatgcattttttatttatgctttcaacttataaagggcttattggaacataaacccatcttaagtggagaagcatctgtactatccagcacataaaacttggaaaggatgcccccaccatgatatttcaaaaagcaactctttctcataagtaaactttctcttcgagtgttgcaatagaagtaactaaaaatgacgtggtttttaattaatatttgctaaacatgagtaaatgaatacataaatgaataaggggagacataaaaccagatagggtatcaatgtgaagtctgtaagagaaaaaatctattctctaatttttaagtaagtttttaacacctcacatgatctgccatgtgtatattgtgtatatttcatgcatctgacaaaaagaaaagcctagttaggatttcccaaatttggatgttttgtatacacctcgaagagccgtcatcaaaaaagggtcaccctgattaatgataatcaatgaatgaaaagactctttgactgtatgtaatagatgcttttctctgtgaataagtaacatatatttatacaataacaagtggcacgttattattaattgtgaattccaaggttaagaacctttgactttgtgtgcatgactattgagacacttcaacgtgctcagacattcaacaaactcaccacttgctttcatctgtactgagtctgtcacttgacttttgacctttcatttggcactgtcctgtcatttctttggtttcacaaattttagcttcttacttgacctctcaactgtgacctttcacttgacctatgatctcataaattctgaaatctcatacatgtaatcgagaaacaaataaacaaaacatctggatgaagctcttcctgaattaagtctgagtagatgaaacatagaaccaaaggcttcagtaagtaatgtaatatccactaggataatatgtaaatagtagaaaataaattttttgggattgactaagatacggcaaattatcaaaagactcagcattagcttctatgaaaatatttctttggtcacattaaaaataacaatatactaagttagtctggttaaaaatgaaacatcttcaatgtaatactgaaatgtaaaatcttatcctcaagcatgagagtcagaactcttgtctgaataagtaccaaaggatttcactcagataaagattgtgtaactcactatagtattcaatataaaattgttattttaagagctaactgaccacccttagtcactcattctccactacagttttattatttttatagaacttgtccccgtatgaaataatcttcctttattgatgtgctgtccctccctactagaatgcatgcttcatgagggcgacacatatttctgctgtgctaactgcaatgtctccatcacaaaaaaaaaaaaaaaaaaaaaaaaatgtggcacttactgttgttaaatgaacatatttgttgactgaataaaagaatgactatgcttcccaaaaatcactgcatacctgaacaccagagcaaaaatctaaagtaaatatactagctaactttaaagttatatagttcacccattttttagaagtcccatactatttaaccatttaaaatttatcctggatttttctatattggtacttaacttcacaaattttcttactctttactattaagaaattatttttggtgcaggcaggttggctcacacctgtaatcccagcaatttgggaagtccaggcaggtggatcacgaggtaaggagttcaagaccagcctggccagcatggtgaaactccatctctactaaaactacaaaaattagctgggtgtggtggtaggtgcctgtaattccagctagtctggaggctgaggcaggagaatcgcttgaacccagggggcaaaggttggagtgagctgagatcatgccactgcactccagcctgggtgatggagctagactccatctcaaaaaaaaaaaaaaaagaaaaaagaaaaaagaaattattttttctgacaaaatcaaagacatcctcaaaaactctcagattaacaaatgttgataattagcccacaaatgccagctgtagcatgatttaagtcaaacctcatgctaatttgaatatagtcatgtttctttcagtagatgtatgaactcatatactaggaaactggtttaaattcacaggaacatgcgaagagttactgaaacatgagagagcatcaagtttgatgttttgctacctgaaatgaccacagcaattttactcttaggcataggcaagctaaaatttacaagcccttcagattaatgtaaggaagactcaaacaggaaccataaaaccaaaccaaaaaaaccccacgaacaaaccattgaataaaattattactaaataaaacaatttggaggcaatatcttccaaaggtttagctaaaatatcccctggactctcttataaaagtttgcataaggcataaagctgattcagataaacaaatctgattagaaagtccactttctcttaagatctcttatagaattcaactaaggaaatttcagtttgaatattaaattaaaagtgagttttcactttcaaaatggtggtagaaaaaccactatgaatatatacatccactatttagtcagttaacaaaagattataaactaacttacacaaaatatgtattatgattaatcctataaaatgctaataccaataaacctagaatgtctcatacttatttaaatcttacctgaatgtatcacatcttcatcataatgagaatcgataataatagattaacactatatattttttgaaatgcagaataattcttgctttttatgggttccaaaatacttaaagatatgttacatgtgaactgctataaaagtaaattttaaattaatcacaaaaccctaattttctgacgtcctcaagcaaagttgagtaaattgttcagtttggctaaagcttgaggttctttcttgtttaatccttttttcttaaaggtaatcaaaatagtcagatatggtacaaatcattttgttggaggagaattatgcttgtggtttatttaaataatgtaataccaataaggagaactttaaagaatattagagtatttgaaatatatggagaaataaaaatggcaacaaaaatataaaagaaaattaaatacaggaattattttgtagataccactgatatattggacatactaacaatataatatattaagaataaaatctaagtaatagctatcaaaaagaaatggcttgaaaagttcacatcaagggaaacctattaactatttagaaatataagttaaaatatattataattgagattcaaataaaaagttctagacttccagatgaaaataatatgagaacttaaaaagatatttattttggggggtgtcctaataaataaactagcaagcttaccatttctgtgtcatatcctacattaatctattaatgtaatccaagaaattgtatttttttctaaataagtaaagaatagaaacctcagttacattttaaaaattacaaggaaattagtaacagaaacagttgtagatgctgtaaaaagcaatatggaaactttgaggcgaaataggacagagtacctaattccattgtgttgatataacaaagcccagacttaaaaataaaaggtttgctggctttacttatgctttagttgtagaagctttttactacaagaattcaactgctgaagttcatttcctgtctttaattctaaacgagcaatttgctgataatttcctgtctacattttcataaagtagaaagaacatgactggttaagctaaatgtttcaataaccaaataaacttcagcaagtgtagtttaggaaattcgacaactatctagaaactggttttatgattatagaatgtctgaataccatctatctcccccaaatgtttgaaaatattctgaagacctttgtgattgcttctttgacccccagacaaatacagcaccattgctttgcctcagtggccccagagcaattaaagtcaaaagagtatgaatcccctgaactctgagctgttccagcatagatgaggaagaaatgacctctagctgggtttcagcctcattccccaacccccaccctaaatcttcatgcctaaaccaaaattcatttgatggaactttttatagactgtgtttttgaattcatgattatcagcatttggggttgaaattaaaataggacatcactaaaagggactcgtctaaaatctaaattaagttgtcaattaaggatgaagaatggcttgttattattgccttaaaatgatgtgtcctctttgtcctgttgagatcccaaacatcttccatctgaaatctattataacttctgcagaagagaatcttaggaagtatacagtttcctaagtctcagaacttaggtcatgaaggctcaaagaggggatgatccataaagtcatgaaatgggacaactaaaaaacaaatgccattttgtgcctctacctgcctctagatgccagccagtggtagaaaaggagtcagatactaattatgaggagagattttattagacagatttaaggggaacagatgagcccaaatccccctttttattatctactgtacacttagctaatgctttctcctgtgagaaaggcttaaacagtaagcacaaacagcacaatgaaattgtaatgccctctccgtgtggacctggattatttcagccaccagcaatgtgagtagctgcaggtgttgcactaaataaagtaatataaagtgtctacattgcaacagtggaagtactgtttcaagacccttgtctgctttttattaatagtcagattccttcctatcagcagccacaactacctttaccctattattaagcaacaatattttgataggcaaagatctattaaaaatcactgttgatattttgtgaccatagtcattttggagttgaataagcgttcaatcttctcacagaaggggagaacgtaaatttgtgattcaggaaaagaggaaaccaggggttacaaaggtggagaggccaagcagaatgaaacagaccccctccatcaagtaaaaaacttggcaggataactagaaacagaccaaccctaaatcttagggttcatgagctcttagaaacataattaactgaaataaaactaatattccagtgttaaatttcaccttaacatacatcagcagttacaataacaccaggtataaagagaatccgaaactattcattttgtttatggaatgtaccttaagctagggggaaacattccttcacacattagtgtaatttctaaaatggagaaaaattatctacacaaaaagaactgtcaagtttaccttactctatcaagaagcattacttttggggaaagtgtactgatcacttatttgaaatttcttgtaattatacagagcaccagatttccaaagcatttgttcttgagaaaggaaccactaatacccaggaaagaaatgttgaacaggaaatgtttgaccaatgttgcatcacaagatatcaaaagaatttcactttggctacttcagcgaatcaagtcaggacatttttaattttctttatagtctttaagcttctacaaaataaggtttccaaaaaattggtgatattaaaatttttctagaagttttgatacatgaaataaagtaaaaatcttctcctagaatgaaatgtaaaaagtattagtgctgagagtagataaacaacattagtgatctgtgaatagcattcaggaaattccatctatctgatgatctgtcggctaactgagcagtgtttcatatgtcaccagctaactaaagctccccattgtgtttatagatttcttttaaaggcacttttaatgccgttttacacattaggagatagttaatttagaagtaaatggtagaccacgagaggagccttcttctttttcttctttttaaattgatgtccatttgcatctcagcacagcaactccacaaattcctgactctcaatcctgagagtcctgtcacaggactgcctgcggcaatcagtcctggtttctttttgaacaagctttcttttaacacttaaatccagggatgatttaacagaaagtgtctcaagtctatgagctacagcccccttagactctacccaaacaaagctactaatgtgtggtcagtttcttggcaactccactctccgctgataacgctcctgcctgctattctccaaggagccggctgctggaagactgctccgaacctcatccccttggtgctcctgatgcgggcgatcctccgactgctcggcgccaaccacaacatgctacccaccgtgagagagcaggacgcgggctgctctagtcaggacttatcgtctatcatactgattgacgaaaccaagagtgagcagaaaaaataaacacgaacagaggctgcagtgtatgggccagtcagctgggagttttagtatttggccttggtgatcctactctcatggtaggttatcttttccttgtgctatcatttatcataactttgagggccagggagagaaacaaacctacaatttttctattggttacattcattagactgcttgcttttttttttttttcttttccttagcactccttcctttgccccctataataatcccgtcccctcacatagtattcccttaagaatggtgaaattaaatctaaatatagctctccccttttactcctattccagcatagatcattgcaagtaattaacctttgttattccatcaaatctagaatgcaaacctacatgctaatttacttaagtcagactcaataataaatctgcgtctatagcagctaaactcaatgaagatcctggatgttgttcagttatttggattactaacatcttctttttgaataatggcacttgactttttcaggcacaaaccatgttttgtattggtcttgacagccactataaagtactcccccaagtgtcagtaacaaagatgatttgtatgtggcttgcagtcttccagtgttctaatagctttctcattccaacccagaaacatggaacacagggcagctggttaaagctgatacaagcatttcttctctcagcaggctattcttgcataaccatttattttgcagagttttaaagtgcctgaaggatttaattatgtacatagacaacccctataaactctattctagggtttttattgacttttgtgctgggcagctcttaggcatttcaattaagtgtttttataagaaaaacgacaatattgttaaaaaaaattctttatagatacttccaaacaggttttttcccccgtctgattgaataaactatttaattgaccaaaaaaatccaggttaattcaaagtttggtttttccactttggaaaaaatagagcgtttgagtcccagacaggtttgtgaaaatgaacctgccaatatcagtgaaagaatgggcagagggagaacaggattacttcgaaacatactctgaaacgtcacatggctacctgttactccggagtttacttaaactcatgagggtaaaaacctaaatgcaaaattttacatgttccactaaacaagtgcagaataataaattaccaaattcatttggagcactcgcctgacaggcctaaccctcaaaagtctccaggagaccccaaagccccctttgtctgccttcttcaattgcagggctcaagtatttacaaggcttctgcaaacctgccttcattatgatgtgggatatttcagtcccagcaggtggccaacaggagaccagacctgcccgtgaaatatgtaatactttttcatatactttaaccagaaatgtgcccctccacaactctcctaactgttctaatttccctttctcctcttaatctcctcagaaagccatgagcttgcattaaaatctacctaaaacatttcacccacaggcaatgtaattctgaaacaagcaaccaacatttcacagctctggagtaatagattaatttgaacctaatgttgccgtcgtttactgctgcaaatgttctggtgtagacatagccccgaggcatggtgctgtggcatgcacaagtttgggagccggagctacagttggcttaacatctgtgcatcacatttgccatgtgcctcattatcctgcaccccactgtgcctacctgtccccctcagcttctcagccacaggcgatctaatttttttcccctccaactaagaatctttgttctccttctcacttactaaatttttgagagacctctgcacccaagctgtggggattcggtccatgtgaacagcccagaccctttagattcttaattctccattaggaagaggaaaattacagcattaagtttctgacatgccaccgcataaattgtgccatttgcagaacctaccagagtctgtgactaaacccagaggcgtgtactaaagcatggtgttgttggttttgactttaacaagtttggtcggcttcaattatctgtaagcaaagaaatagtaacttccaactccagatttcagagagatcaacaagtaaaatctagtcacagaaagagaagattgccacaccaaaaattaaagccaagtgtcttaaactatttaaggagttagcatttcaaagcttattgacacaaacagttgatacatacaacaacctcactccatcacacacaaaaaaacaaaaacaaacaacagcaaaaaaacgaaggctttaaaaatagatatagtaaccaggccaagcagctgcttaaattttaatcctgttttaacaataaaagaatcatatgactcctttattggttttcctttggaagtgttctgggtgcccatttatggagagacagaatgaagatttagccctacccaaacaatttgaaatatgcaaaacataaatagtatttgttgttatcattataaaggggaaatataatattattaatagaagtatcaataatgaaatatgcgaaaaacaacagaacagccacgctagggttaaatgttgaaaagccaccatccttgccacaagatagaagaaaaattcaaaccagagacattagctttaaaaaagccaaagctttgaataaagaaatttaaaaacattatcttcatattatatttgacaagctggatttagacatagtcaacacattaaaaaggtggcttagtgcttttcaattgtttactagtgtgctagcaaagtactttactgtgggtggtagaaaattaattagttttaaataatcatttttatagaactaataatttttttaaaaaattcatcagattcaaacaatttctacaacctatcactcagacttttagaccctagtggagaacaaaactgagaggtcttaggagagaatgtttctaatgccctctccaagtaaaaatatgctctgttatagaaatagtattggatttccacacttccctacataatcctcaaattctacgcagtacagagcattgagtcttgcacatttcattatatgcttgaattaatttaccctatatggaatgtgttacctttacaataaaaaagtcgctattcattactgagagtggacagatggaacatgttcaacttaagacatcaataagaagagagggaaaaacttataatctatgtggcacagcctcctccatctggtagttcccagcttgtctgccaagccttttttttccaaataaaagtgagcatttctctttagagttaatgggacattcttagatattgaccctgattctgatttacagatattaagcaaccatgcaattaaaatatgatgttttccaaaggtaatccatatcataggggaatatttgagcctaattagaaaacaaaaattagaactactataataatattatgataatactaaaagcattatcagataaacaaaacagtgtttgatagattatgaaggcaattgaacaagttattttattctcttaaaaaacacactgtaagctgcataaatacaacattgggtcagtaaggtggctggcaatctctagcaggaagactatatttgcacatccttcccaagcccttatctagcagatgacacctgcctgatgtgtcactaggtacatcccaaaccacaactatcatgagatcactttgctaagatgcagtacacaagactatcaggctttgaaataagttaaatcttatcatatcttgataaaagttaattagattatctcatctatcaactgaaacagtacacatacactttttttttttttttttttgagacggagtctcactatgtcacccaggctggagtgcggtggcacgatctcagctcactgcaacctctgcctcccaggttcaagctattctcctgcctccgagtagctggcactacaggcgcgtgccaccatgcccagctaatttttgtatttttagtagagacagggttttactctgttgtccaggctggtctggaactcctgacctcatgatccgcccgccttggcctcccaaagtgctggattacaggtgtgagccactgcgcctggcccacatacagtttttatgtatttacctctcctctcatgtatttgttccttatgtctgctgttctttgctttaagcaatatcattctatgaaagacaatggattgggtctttatttgtgtgccagctccagggcctatgaataatattatgaaacatacacccaattctctggcaatagcctattatttaaagagatttttttaaggtatagaccatttttacatattagtaaaatatataatattataccatcacaacatattggtaaataacaattacaaccgtatctttattattaaaccttctgtgttgcaaaaaacctctgaaactttttgtataaccctatcatggaaaaactactcactgtatataataattactatcattcagtattatttaaaaacatgaataaacctatgaaaaatatagaataaaaagagatccttgtaaaggaaaaacaaaaaagctaaccatccacctaatacttttttttttctttttttttgagatggagtttcactcttgttgcccaggctggagtgtaatggcacgatatcagctcaccacaacctccacctcccgcgttcaagtgattctcctgcttcagcctcctgagcagctgggattactggcatgcgccaccaccctggctaattttgtatttttagtagagacagggtttctccatgtgggtcaggctggtcttgaactcccgacctcaggtgatctacccgcctcggcctcccaaagtgctgggattacaggcgtgagccactgtaccaggcctctaatacttttattcaaggattaataaagccttttaatgcaatgatgtaattgcatttcaagtttcttgaaacaatttctaaaatttatagcaatttagacaataactatttattaaacactcactacatgcttatcccacaatccctaaaatgtgatggatatgctgtcatacttttggcactgagaaattttctaaaaaatacaattttattgacatatatttaaacagaatctttggacattaagactgtctgcacaaaaatttctctaaattactttgttaaaaatgtgatagaattcagttaaacctgaaatttgggtcaatatgataccaactagctgacttttgcccagtgaacctacatagctgctccatttcttcatctctaaaatgagaattatcataatacttatgtcatagataggttgtgaagattaaataaaatcatgtgtttaagtatttaggatagcacctggcacagggtaaaaacaatatgttaactatttttattatgtatgtatttagaagtttcaagtaattctaaacttgacaatattattagaattgcattacaattacttgggaaaatcactccaaaccaattaatctgaatctatgaggataattataatgtgtagctagaattgaaaacctgtgatgaagatatagaaattcagcagattggtggcccctaaatgatttgttttcgctacttccttgtgtcctcctaaagcaaagctcaactcagtgatttgcagatagtagatgcttaatcatcaaataaaatggaaaactgctaaatctacctcttagtttgtattgcacaaattcttagtctaagtctctatacatggtataacatgttcagggatgcatttctaggcactgttctaggaatacccttttgttgtctgtcaatttgacatctctctattcatctcttctttgagtactattctttgggtactgttatggtacccaagattatgtcctcatatattaaagccctaacacccaatgcctgagaatatgaccatatttggagataggacctacaagtattagttaaaatgagctgttatcgtgggccataatctaatctgattagcgtacttctaagaagagaaatgttggaaacacaaagagacaccagaggcatgcatgctcagaggaaagatcatgtaagtagggcatagtaagtaggtagagatctgcaagccaaggagagaggcctcagaagaaaccaagcctgccaatgccttgatcttagacttctgggccccggaattgtaaggaaatgtatttctgttgcttaagtcactcagtctgtggtactctgttgggacagccctagtaaactattacaagtacgttcatctctccatcccatttataggcagggttccaggctctcaatctcacccaaatgccctaccttccagcatactctacagtatattgtatttatttacatgtctgatggcccacaaaaccgatttcttaggctaggaattatctaatttatctttgtctaacctagcacctatcatgtgctttgcgtgattgttgaacgagtgggcgaatgaatgaatgaaccaataaacacctaaatggctaccaagtcaaatgaaggaataaatggaagggaagctaccataactgaaccatttctgattgcatccaaatcatccctagacttgacatctagtgccacaacctagtgctgctgataaatattcaaagaaaaagacagaacaacacacaattctatgatttctggactgctatcaactaaacctacaaatagtgtttgcctaagatctgcaaatcttccttggctcccggtccaaggcagaggtattgttactctaattcaggccagttgcatcctttccactttgaagactgcaaaagtcttgctgagagtcgagaagttagcctgatagggtagccagctttttaaaacattgatccttaaaaaatctgtttttaaataaaatttcgtggtaatcaaatgtgatacagtctagattgccttgatatggaattatggaattgttgatgagcaataacattttgggcacaatggcttagaacacagtttaaagccaaatagagttctagcatgccaccccagtattatgggcattttatagttacatcactcattcatggtacaaaaatccaaaaggtggccctcaggggttactggtaatgaaacaacagagaattaagatgaaccaaccaatttaaatttcacactctcctctgctataattgaaaggaaccgaggttgcagaagctgtttcagaatcttttttaaatacaaggaaacgttgtgagcagacatctcatttttattggtacttacattctgcatatgattaagcacaaacttgcaaagaattaaccactccaccaacccaatggatccgttctcaaacttgcaggaggcgggagtgtttgaaagggaaatgggggctggcgacctgaagcccactcccttgggtcagtgcatgctgggaggggaaatgagctacagagcagacaattttcagcatcagtggttttactttctttaccaggcctcacgaaaacacactgacaaaacaaaggacacaaaattaatgacccatgcattctgtcaattgactcttagtagcagtggccagttcaccttaatttttttgttcgcattgaacatgtagcccaaggcactggttaaggttcacttaagaattcttcaaaggcatcacttggttttcattaatttgttaactgtaacttctcctttctgctgaggaacccgcataccaagtgaagacctttatgcaaaatgtagaaacaaaaggcatatgtttgaccaaccagcttttctcttgtttctcgagcaatcatgtctcactcgttaatattagagaaaattatacccatcagatttttctagcatgtaaaatatatttaaaccttctcagaaattcaaatgtcaactctccgttattgtaggggaataagtaacactgtagtttattatgtctgtgagtaattatttcctaattattcctgtggttgttaaccatgatttttgatgaaattcaatttgagtatgcatgaactatggccaactaactgaaatttaaggattaacaaaaaagcagtatgaattcaaaaaaaggtataaatggaaatttgtatttacatatctgtacaaagattacaccacccttaagatgatggtaactttttgcatttaagttttctttcactttctggccagcattttgagaatagagtaaatgtttccacttgttcaaaactcacaaagaagattcatctctacgataattttggtaaatttgctaaaatgttgaacaggttttcaagaatgcataactaataaacactgaagcaccgatggcagtgtctgaattttcttcatcaagtgtaaaacaagaatacaggatgaggcaacagttgctttcaagcctcaggagaagttagcaattttaacatttctattcttaagaaaagagtatcaagaaagttctaagagtgaaggagtctactctggggacatttggtagtttttagcaaaggaaatggatcccatgaagcaaatgtatcattcctttctataaacttctcaaacagttataaaatatgatagcaatgcttggttggtacaagtttgagttagttggatctgtcagcatttccattacaaatccttgattttcaaggttttatagttcagctgtgaaaagtttctttagaaagaaagttggcaaggtggtctttgctagggggtttatcaaattgaacaaatctttgtttagttatctctcagttctgtgagccgaagtctactcccagctagacatgccaaacttccagcgacttgaatgccagagacaggctttttctctctttaaattcacaccacaagagcttctcttattcttgattcagaagccgccaggacccagctcatatcctgtgtaacccagtgggagaggagccacatcatatgtaaccctgtaggacatatgaattcagtcttggccaagtgtctccagcatgaaatgtggaccgcactacagagagacttggaactttggaatatgtgtataattaaaatgtaggcacatcacactactgcttgcaaagtgaagtggtgttcatttattaaaagccccgtcgactgtggaagtgtgaatgtgtttcagggcagttctgactactcagaataggaatctattgctgcattgcttttaaagaaataggtggaaaaaagataatccaaaccatatattacaatgtaatatacagataatacaaacatgtattctatacccattgtatagtttttagatgtacatttattttattgaggttatggtgttggaaatttatataaactgtttttgatcagaggtggatagaaggtcatttcaatcgaatcaaatgtaaaattacactatcataaatgtacaaaaaatttaggagagatggctctgggcaagatgatataagagttcattttaaaactctgtctattaaaatgttttgtaaaatatcaatacatgcagcaactttaatgtaaagttatttatttatatatactagcctagatatctttgacaaataggagtataaatcaaacaaaaattcttcacaaaatgagctttaaatttgagatgggggagaagatatgcatttagataagcataataaaagataaaaatcctcagcatccaaaaagaagaacagaaagtgtgttctggtaggttagaaaacggagatttatgggatatgaccaagtacatattcatattaataaagttctatgataatatagtaaaatagttaactatagtagcattcaaatattttattttatatataacaaatatttataaaaataatttatacttatataaatattgtatctatatatttaaatgtgacatctattgaattaaaaatgcaatcaagtcttaggctaattgtttcattagtaaaagtctacacttttactgggaaatctgacacaccaaacctgttagaatatggaactacaagtttatgcggtcaggctagccagcccacagaggcactaaaggacaccacatgtcgaattcaggtgtcatcagtggttttagaaaggcaaagccccatcaaaaggcttttgtagacaacaggctagcagatggctaaagccagatatggtttgggtttgttcaatatcttactctattctcaaactttggatttggcaaaaccaaaaccatattttgccaagtcctttcttccttaattcttaagcccatgtgcatttcagtaaaatttaacccatatgtttcttattctttaatacttaactcatcaaatatttttctataagatccatttgacattcaaaagccttgtgagtcttaaagctctggatttttagctattttttaaaattaggagttcttagcttcctctggaaaacaggaagttgaattctgccaagcataaataaatgtgaacatgaatacaataggttaatccaacaccaaaagattgaatttggttggaaatagcaacaatgctcactatatttttacaatatgcctttctgaatctgtctgcacctagacagtgactgacataatttaaatctaatgtaatgaacttcactaatgctgaccaacaaagggatcaagaaatatctctagcgtgtaactaaaggaattctcagcaaacccatttgtaaaacaagccactgctgtttagttctttttttttttttcttgagctattcgacttcttttcctaaaagttgttttgaatacacagcaatagaaaacatattaattaccatgaccttagagttatatatttatcagtaaggagcacatgtatttatgtattatatatttattctgaaaataagatgcaagcttcagaatgaaaagtataagatacatgcttctgaataagacacatgtatcagaataaatacatacttatgagatacatctatatatacttcatatgattttttgaatgtatatatttgcagaacacttttttccccagaaagaaaaggaaaacaatgataatttttataatggcttaacacaatttcatgccatcatataaagtcaacataaatgcatttagaaaaggaaccctaacaaaagagtaatgaaatgatctaccctaatcatatttatacttctttgtaccccaactacatttaacacatctaggcttgaagtgggtgctcatttcattcttattagattaaattgaattgaatccaatagcataattgatgactcatatcatgatgatccaaagaataatgacactgttattcctatgaaatatttaagaatttcttgtcaaaaccacttgtattagttatttctcctaacaatcatgtgatgcccttttaaaaaatgacttgaaattctctcttctgagttcccatgggcaccagggtacattctgttataagacttagcatattgtttggacgggatgtgaaaatcttggcattaacatctataatcaaccagaagatgtcattgggaagcaaaataaaggttgaaatctatgtcgtagggagtcagtctagcacatccaagtagcacatccacattcctttcatgagtgaaatcccatgaatggatatcaacagagttggtccctaaacctgagaactgactttcagcttttgctctagccctgttctctgagattctcaagccaagaaatggtccaagaatctcttctacctaaggcagcagacactcattcattcattcaacaaatgctagtgagcacctactttgttacaggcactctttatgacaaaagttcatgtcatcttgaagcttacattctagtgatttttactatcttaacaaaccattttctcagggggaaaaaccacagtttctgtacattttatgtttcttgtaacaggaatgcacgttgaattataatttcctaaactttcatgttaaatatttgacattgttttcaacaagttctgttcatgacaaatgagataatattactctcagataacccctaaaataaggtataaaaaggaaaaagatatttctttcaattttcatgaagaaatgagaaaaaatctggaaaacattccaaaaatcttagaattttagggcaataatcaaagttagaagtggacagagaactaatcaatggtacaaacagaagggcaggatgatagatatagaagtggtgttggagtttatctggttctagcaacagcaaaaacaggatccatgaaggctcttcttctgcttaatgcatagcttgaactgctgctagccgaccatggagcatggccaccacttccaaaatattctaaaggatcagagatctaccaaaggaaaggatgcacaaacactgaaacctgtttgacattcccaataatccaattccttcaggtttagataatttgcccaaagttactcagttactatctcttcacattgcttgcatagacttttgtaattgacagaagtatactgcttataggaggaagagaaaagagagttgatatccaccaagtatccatgacaccgagccggtacagtaccatatttcactaatataccaattttgtgagctgagtagtatccattttataaatcaggagcctatgcagtccttcctagtcatatgccatctctaaactggttaaaaaacaatacaaaacaaaacctggagacttcatttttttctctgtgcttgtgttagccttcctaggcactagacacagggaccctctcatagcgaggaacataggtaaacgtagattattggataaaagaaaacgtgtggctcaggggtagtctcggtgatcagcctgtttatatttctgtttccttccaaagtaaataagttaaaggcatgaaatactttgacatcattataagtaagatgctattttagaagtttcaaataacctggtcttcattcattatgacagcacagactttattggtcaagttccttacaatcatcaagtgtttgcatcaaaatcttgcactgttatgacaaccatcttcacatactactgacttctgtattgtggcttaaacataaattctcactttctgaagacatccagctggaaaggccacttcaactgccaagacgatgttccacaatttccacatctgctttagcaactctgtcacaggctcattactaattttttaatccatttttaaagatcattttgttaagtatacacccaagatagatttttatttatgaatggcttcaagttatagatgaaacatgcctgtactttactcttttcctgcctttctcaatgatttgacattatgactaaatttaagtgttctcaaaaaaaatttgaaagataattaacctattttaaatattcattctctggtttttctagaattctgtcagaaaagtcttcaaaaatacttagcttcctctagtttcaaatcaaaccaatataaataatgggtagaattactaacctgcagggaatgtcatcctaaatttcctggcgctggctatgtaactgtatgcatgactggtgtatttactggaggcagtatatactgtataatgttccccaaaaactcatgtaactaatgcaatatgataaccactagggtgctactgtgacgtaaaggatatattaccattttttccaattcaaacaagaaaaaaaaaaaaacagtctgccttaatggccctgccctctaaataaatacattgcctgctctactgaacttaaaattcaaggttatatatgtcatcctgaagtaaaaataattctgtgggatacactttccagcaccaagatattatttgattctttgatcaattatttctaacagtcatttcaaaggtctaaatggccatgacttttactaggagaacgtaaaataaaaatgagccttcaataacacagatttcaagtgggcaaaagatggagttagtccaagaggtaacacatctccttcgggagatgctggatgttggttactatcaacgtgttttaagctggatccagtagatacactcagtcatcagtagaaaaaggttcagtgaagagaggtcctgagccataggacaggaaagatgcctgggcacatctagctccctgctcctaccttctcatatgcccatttccatgatttttcagatgtggaaactgaggccaacagctgtaatttcccagggtcccagtcattgtagagtaggcatagagccatctcctaacttccgagagggcaagatgctgattcttctgaaataagttttagaataggaaagctagagctgagcaaacagaaacagcttcatggcaggctgccaggaagacagacagcacaaagatgatggatgtaagaaaaacaacttgtaagtggtccaaaaatgagaatcctgttggtttttcgaaaatactgtagttttttaaaaattcaattaaaataatatccatgtttaaaagaaaaaagaatgagcaaaacaaggtaaatataaatagattggtgtacatgtacctaagctttcagcggaggctacaaatatacattataagcaccaaagagtgtcaagagcattttaagaaattggtcatccctttccactttgtgagtaatacttgggaatgggataaaaaataataataatagcctctagggaatgttcaaagatgaggtaatttgcatgtgtcttccagaaaacattaagcatatccttctcctctgccaggataattttgaatttctggcattaaaacttaaattctctaccaaaattgaccaatctcctgttaccactctatatttatgttggtgtaacagtttattctatgcagtattagactgaggctagtcacctatttaatcttcacatttttattcaaggtcttattgaagaaaatccccaaattctgtgaaatttttgcacagtttttaggttctaattcttcctactttggggctatggcaactcagccaaggagggcaaaagtgattgcttctctagagaaaacttggatatataagtttatcacctttttctttcccttttttccatcgggcacataataatttggcctttcctcaaccatcaagtaaaacccgtgagctgtggaggagctgccgtaatggtgtggataaatgcttccacttcgtttagagatgtaacctatatattaactattgatagaagcctatgttgatatctcatttcaagatagcagtgtaacccccaaatacaagcaaagaacatgcagtgtaagaaaaagtagccgggcatggcggcgcatgcccgcaatatcagcactttgggaggccaaggcaggcggataactttaggtcaagggtttgagaccagcctgaccaacatggcgaaaccccatctctactaaaaatacaaaaattggctgggctggtggtgcgctcctgtaatcccagctactcaggagttcgaggcagaagaatcacttgaacccgggagacagaggttgcactgagccaagatcgcgccactgctctccagcctgggtgacagagaaagactccatcacaaaaaaaggaaaagaaagaaaaagaaaaagtagattccagaaaatgtatgacaaatacattgggaaagaactatagaactatagaaagatctggaaaaccagagattagaactagaagtgattttggaatttatttacttgcaataaccttcattttacagtttggaaactgaagcccaggaggtgaagcaagttacccaagtcataggttattttcttttattcatttttttaaaaagatgaatccattagtatttctattactgttcttctaaattctgagtcaattgccatgttaaactgtggagtaaccactcctgctctaagcccttcatcaaactcttcttggctcctttctctgacctctgtgcttctgaggtgtcattgttgttagttagcagctgacttctaccttttagataatgcttacttcaggaattatgtctcgctgtctgaaaactgaagatacactcatcccaaatttctgtgaatggagagtgatcagtaggctgtatttttcaaagtcactaaataaaagtgttgttacaaacattttaagtacctccactgccctaacacccatcaagtcacttggaggtatttaaggttaataatatcgactattatctgtgttcagttaaaagtgccttcacattgtattcacatgtttaatctcatgtaactcttaaaataaccaaataaagtggtcatttctagcatttctgttttacagatgagactcaggtcacatgctgaacactgacaatacaacatctatggttttgcatcccaaatctcaggctctcgactctatcatgaatatgtagtcctttaagcttaaatagtgagtttctagagctgatgccatttttaatgaaggactgccctaatgagttgtattatatttaacagacaacactatgtggccaaggtggccaagacagaagccaggacaaaaagaaaaagggcccaatttttttttttaagtgtggattgttttctcttggaaaaacaatttgggttgtcctaacagctgccactttacaactgttcatagttaaatcacttcctcctacatgtctgaagataccgacaccggctcaaatcttacgttatacagtatgactggcttgaagatcaggcctaagggcatcatttagtgctatgcttacgcttctggattctattaggatcatactttatttcttctggccaaatattttctgggccaggcacagtggctcacacctgtaattccagcactttgggagcccaagcactttgcttcagcccaggtgtttgagaccagcctgggcaacatagcaagaccccatctctaaaaaaataattaaaaaaaaattttgcctgacacagtggcacacacctgtagttccagccactcgggaggctgaggcaggtggatcacaggaccccagaaggtcaagctgcagtgagccataattaggccactacagtccagcctgggcaacagagtaataccctgtctcaaaaaaacatattttctgctttctcattggagggcttacttgagtccagagcatattgactaaaagcattcaacgaagaatgtgtttgctgaaagcagggtgatatgttgatgttgagtaagtctatagcccctggagtctgacagtgtgggcttgaatcccaacttcacaaatcacttgttgtgtgatcttggtcaaatttgttaatctctttctgacccagtttcctcccctgcaaaatgggttcttatgaaggattaatgagttaatgcatataaagtgcttagagtagtgactgacacagagcaacgatttaaatgttaactattatgactgaaagtaggtacaaaatgggggaaatgttcattaatctctaattttaatttcttattagtgggtattaataggttcgtgtccctttatttttagataatattggactccctgacatttggtccactaaaagctttagttatattggtgccaaaattggctagacttactcatcatattttaaaatttacctttttaaaaaaatatacccagtaaccagagttctaaagaacttacattaaaactaacaaataaaactcatctgttgtaatatgttcattttcattaaaaagacatcagtctgctttgtgcttgcattagaaatagaacttaatctctgacaggcgtttctcattttccagttattctctaaggagcatatgttggcaagcatgcaatgattttttttttttttttggctctgcactgtggttgcaaatggtgtcattgttcttggttaaatctgcgaaaagtaagcctacccctctcattttttggcttcacgctaaagtagcctttatggcaaagaactgcatgagtttatcagtctccgttcactgcccatattccaacatgatcaaaggctgctaaaatagccatacattgagctttgttttctcccttctcagtttctgcacttgtcgagaatgataatatatgttggaataaaatctagatttttctacttttgggtcaatataggagcttctgagagaaataaaacaggataaatatttatccctaaagttctttgcaggcaggagaaacagatttagttgtcacttgtcaatgaatatcatcactgaatatttaaaagttatacttcagacaagtatttaatcattaatgaaatcatggcatttatcgtatgtcaaaattcagtgcatagattggagattagttctagtgattccagaaatacaagaaaggaacaatgaaaaccattccatgataatagagcacttttttttctaagtagttggtttattcatccccttcatgatcgtggttgcataataaagttgcctctcaagttgtttctttacacatagtgtaaaagttaatagcctctgtttgagatgttatatcctaaagataaaataaatgtaattttacattactgtaagggacaaactgatattctaaaagataaaaatatttttttctttattaatacatctaaattatttttctttagtttttatttgggaatagattttaaaatacatggagcactatatttattgactaattgtgcctcataccaaatgattcatgtgagatgtttatagttctgtataaattagccacaattatctttttcttaagtgcatgcagattaagaaacaaaagaagggacaggcacagtggctcatgcctgtaatcccagcactttgggaggccaaggtggacagatcacctgaggtcaggagttcaagaccagcctggccaacatggtgaaaccccgtctctactaaaaatacaaaaaaattagctgggcatggtggcgggcacctgtaatcccagctactcgggaggctgaagaaggagaatcacttgaacccaggaggcagaggttgcagtgagccgatatcgtgccattgcactccagcctgagcaacaagagcgaaactccatctcaagaagaagaagaaggagaaggagaaggagaaggagaaggagaaaagaagaagaagaagaggaagaagaagacgacaaaagaagaagaatatgtcagtgatacagtgcccgtggtcctaaccacttgctgggcagtgcccacctgtgtgtttttatgcttacaaatgcagaagtacagacaggcacattcattttctaaatactgactcaacatgctatctgtagctacaaagaggccattttaacagaagcaattgcccctagtctttgcaggaaaaagaaagtgggactgagtcctttacaagttctgtaatttgctcaaatgtttatggaacgtctaccctgtgccacgccccaatctaggagcttggaataaactaatggacacgagccaagaaaaattagctgctctcaatgagcttacattctgacttctaatagtaacatcctgatttttaaaataaagctttgccacttttggacaaagactgttgctaaccaatagcattttaataataacaatataccttaatttcaaagaacactggcacatattttggtatttgattctcacaacaggagaataaggctttgcgcctaaaatgcccttcctgaccaaactcttactcaaatgtaaaagctcagctaaaatgtctcctctgggaagccctccctaattcctcatgcaatcagttttatgttacacaagatgcttctcagatatcaagaaaaagttgtctcaaattttcccatactgtatcaattcctacatttactcatctcattccccagctctgcttgccctgatagagagtcgtgggacggaatttgaccaatgaaatgtaggtgaaggccacgggtcacgttaggctgggctctttagagtctgtgattcttctccattattctcttctcctcccagggtgaacttagaagccttttattgcagtggagtgtcacaagaaaacctgggtcctcaaactcatttctggagaaagccccccaccacctagcattagacatcgattaagacataaactattgtgtgaagccatgagatttatctgttgaggcagctagcattaattactgtgattaatacaatgacaggaaaaaatgaatttattttgttttgccacagaggcacatcttttatacaggaggcaaggagttacattaaagatgccccaggctgcttgctacccctgcaagggctggggatggaactgagaaacaatcactacttcagctcagctgcctctttccctaacacttactcatgtcttttctttgatccaaaacaagaaaacccattaattaccttaaacaatgagctgaacttaaactagctatttgttgcctttttttcaagatgctatatatatatatatatatatatatatatatatatatatatatatatatatgtttttttttttttttttgagacagagtctcgctctgtcacccagtctggagtgcagtggcgcaatctccactcattgcaagctccacctcccgggttcacgccattctcgtgcctcagcctcccgagtagctgggactacaggcgcccgccaccatgctcggttaatcttttgtatttttagtagacacggggtttcaccgtgttagccaagatggtctcgatctcctgacctcatgatctgcccgccttggcctcccaaagtgctgggattacagatgtgagccaccgcgccctgccaagatgaaagatatttaagtcctgccaccgaatattgacagaacaggaactcctaggtgtgactctctcttttgatcatacgcagagcacttgcacacacacacacacacacacacacagagttcatttttaaacattattttacttatgaataggatggttgaatgaaataggaaatggtaattctaggcctcaattaatttcattagtgaatactgaataaaattttgagttcattgtcttaaagtaaataggaattagactatcagaggttaataaagattggttataatagctaaaaagggcctgtttgcttacatagtaatgtctttctttttgttttagcatgaaggaactggggatgtagggaaaatatgagcacaaatcctaaactgtcaatgaaatatttattaaataaaattacttctggtttattttaatatttcaaattatatagtatgttggtagaaagataacaaatgaaaattatttttgtattccacaaggaaaaaaaaaacccactatggcccagagcagtagtgaaagtaaatgtagaaataagaaaaacaatgatgctaattagtagatagaataggaatatgatcacttccatacagagtagattcagatgacaggtattctaggttcaggatgtatgtccttagaatcaaaacctgaaatctaagtggactctgccaaatgttatgacatactacttaacttccaaattcctgggggaaaattgaacctaacaaccaaaatgggaaaataaacactgctgctactttcttttccataaattggtggtggtggtttattgttgatgttgttgttgatctttgtttttgccttggctgatgggaggctgagagacagattctatactttcttctagctttcatcaaaattgattgaatatactgttttctcccttcttttacttctcagtatttatcttattgtacatgtctttgtttttattgtatcggtattttagttgcaagatgcctcaagtgctttgtggaagtagcagtgttataaatcaattaaaaaaaagcgaagtatcaagtgcagatattgcatttctgagactatctagtccatatggagccacagaatgctagaaggaagggagccttagaattcttctaatccaacacccttgttaatcaggtaagaaagcagatacagagaagttgacatacctaggaaataaataatcaggggccatttctcttgtaccctctcatccttccaactatgagacatatctccgcttcaaatacactgtccaaattaccacatactatactgtcttaatttatttattttatacaagtttctgaagctttctacctaaagagtaagcattaattaatgtgctgtagagacccaccctcatcctgccaactgacagcagtcctttccacaaactgctgttcaggcagctgccaagagaaagagattattcccatggactcttgccaagatcctggctggggactgtgctcagggctaactgttgcttcgagtagttacattagtcaggaactggaactgtcaggatctctaccaactaagatcttcttaagcagcagcaaaacagaaaaaaaaaaaagttagataaagctcagttgccaatattcttgatatataaatcaacccgaatttgaaggaagattttttttaaccttatccatggctatgatatatggtaaataatggcattgttgagttattcattctaaatcacttctccaccagtgagtaattactaaggatgatcttgtccacataggtcatgttgtggctaatatatagaaccttcttcatagggctctgcactgataagatgtggcaggcaggcatgatggaatgcagacagaggaccgaccttgctgtgtgggcagacagagatgggctccaaagaaactccattacttgaaaatcaatatatttgcaatatccttctctatagcaagaaagtgcaacaattatttgctaaagtatgtactgcgattattgtctctaatttgtagttctaaatatccatttttaaaatagtgagagagtttagtatttgacatagaagtcatcattggaagattgaagttgaatagtgtcatcataaggttcttttcaagctagagatttggaatgaaggagtgtgtgacatcagagagctgggaacccataggccactggccagccttgagcacaatggaacactaaaagcgggagaataaaacaataagttaataacgcatactaagtcacatgctttaggagaaatctaatgcaagaggatgtgttctacccccagtacttcctatgttttctcatgcaggtggcatatcagattctaattctctataatcctttcccttcgctaggacctctgtcccttctgcagtactagtgtggtagtcagtggacaaggaggtacgaggcagcagtactgtgctattaagccattctttactcaggggacagagtaacattaatggatttccagatgtgggaggcttctagcattattgcttcttgaaatctctttgatgtcttcagagttctctactctgaatcctgtcaagaacaaaatctatacacacagggtgttatttatgaggcaacatggctgccagtcagacatcaaggaggatttttactttgataatttcctactctaaataattattttacatttagatcaccataaataaatggaattaactcaaaaaaggaaactaaccttagtaaaagacaaattgacagccaggcagcatcataaatctcatgaccaatgagatatttgcaagtaacttctccttggtgttgcccataaacacatctgttagtaaagttgtgtatgagtacagttacttccccacattaagacctgggtaattatgctattgttagtcaaagttctaagttacttaacatgggttgcaatttcaagtgtttgaaaatggtataaccattaaacgtacagggcaaaataagcaaactatttacttctaaatcgttaaatgatttttgttgtcatctatgaagcatacctaggtgaagtcagcatcagtatttgtttccaggctcacttccaagccaatggcaacaatagaaccagtgtctcactgaacgtggagagccaacacagttcagagacaatagtttcttagctttctcccattgtttcactcacataaagcaatctgtacttcttgtcccatattacatttggtctttaatactggcaatttgaggacatactattaaaggaaaaacttctgtcaaatattattatgcttccaaatcctaaagtaattacttaatatgaagtataagggcacagagacaagaagttgcctattcaatatcaattccttttctttttttttaaaccttactaatagatccaattttattcaggtcattatagggaaagagagagagagaaggaaaaaaggaaggaaggaaagaaaaaaagagggaagagaaagaaagaatggactacatttcccagattgccttgcaactaggttcagttaagaatgagtagttatcattgggtggagacttccagaaaagcccctcaaaggggactgacttatggacatgcactattttcattgttctttagctttctcttgcttagaacatgcacagcatggctgacgatttgcaaccatgttgagaatgtgagattgaaggtcacaccttacgatactacagcaggaagttagaaggatccagggttcctgagaacatcatggggctgccataccagcagttgcctgccagtcttcagatttcttttaaattttaagccactgtttttggggtctctgttactcacacagacataatagagaagttgaaaaagtgttgattgagacccggtgtctaatttttgcctttccatagaccgtatggcctttaaaacctctctttacatctcatggcctcaggtctcttctctataaaataagtgagttgggctggatgatcctaaggaaacaggaatgagaccacgataggtaaatggaggcaggaaagagctgcccttacttgcttctagctttatttaagaaagggacctgtggggctgagggggtgggcagtaggtaataaagtaacctcacccctgggatggaacattagcctatgtttgacagccctgggcaagagttgagctcaaggtgattgaagtaatgctacatttgactggaaaagggcctcccttctgtgttctccatactccctagtccttcctgaatactactgggatgtgatagaaaagacaaaaggagaacatatctttagcatagtccattttttttttcagagtccaacagttgctttccatttaccaggggttggaggaactagagaaacacgaataatcacaatcctcatgatccagagatgcaggaaaaggaagagaagactcccataattttgtcttactcacccacttaaagaatttacattaagacatataagccataagtcacttatttcattctggaagatgtcccctgatggccaagtatagtgcacattgcaaataagcaccacacaaccaattagttattacgttattcacaagaagcaaaaaattgtatctatgataaactctatacaaattttccaggttcctggaaacaatccaaacaatctttctccatctacaatgtcctttaccaagttgaaactaaatcatctgggatggaaaatctttgatagcttttcataccaaccttgtgaaaaaagatgtatgtctaagtttatggcgacaaacagtgttattatctctcctcctctaatatttaaccaacctaaacactcaggggaaaaatgttatctgaaatccaaccactttatatacattcacttggtcttctttggacaagtcaaccagctttttctcacaagtatctcaaatacttgtttggaaagcttttctcaagtgggtatgcaaacaggaggagaactgttctttagcagtcccttcttataagcctccaatgatgctatcttcttgtactttagttaatgaaaagataaatatgatctgtgctgtgcccagctgtgttgttcttgtactgaggaattcacaaaaggaaaattttacatcatacttttatcagtgaacaagcttgctaaagcaaatagatttcagcctcctgagtttgcttcaataaaagattaaacgctaatagtgcaacttaccgcactcaacagatttatgaataatcaaagtctggagaaaggccaggccatttaagaacattacctaccaaacagatgccagtagtatgtagacgtcttccctatagccaagcagctgtatttcctatcgcacaactcaatattgactgcataattggcctttacaaaacatttattaaaatgcaccatttgtcacagacccagtgtttgtttaagagtttcaggtggggagagggaattgaggggtgggcggaagacacacagtttctaattactaagcggatttaattggtaaacagcagcaagtccagcctatcctggtaagatgaaaggtctgaattttcaaggagcaaggagttctttaagaaataaagagaataagcaccttatgagaactagtttttgaataccactttgcatctgtgaatggcattcctctcggtgaacacaaagcccatttccatgtgtttaccttcgtgttctcatgctattcctaggtggtcagcctgccattatgttgctgctctccttttctagattaatacactgaggcatggagacttttttgaatgctctatctacccaaaggagcatattaagttaatgattaagtgagggctgaagtcagcgtgctaagtttctaactctttgaaaaggattgcttatttctccatcctgtatctgtatacagctttaaaaagaaaaaaaaaaaatcagttgactgattccttgtaatagaaaccacctatttaaaaaaatctccctgctaacaaattccaaatacatgtggacaaaacgctttaattagaaggcactgagtttagttgcaatgaactcaaaacgcactcagggtatgactcaagaatgaaaagtatcactttattttgtaggtttgccatggcagaaaatgcaactggattccagttaatatcttgccaaattaaaacatgcttcttaatttgttggcctcctgctcaataaaaatcctagtcatgctctctgtaataggaattcctcactaaacctcacttaatgctagaaaaatgagagtatcatttatctctggcacccaagtatgtcttcagcaggtgcttgaatcatttaagatttctctaacaccaaaagctaattattttagttctttggtgctatttttaattacataaacacctttggtttcttcaattttattcaaactttaaaagagagtaggtttgtgttatggcaataattattcattaagtggaaaatagaaatatttttgttcaaattttagctttctaacagctgcatacgtatataaaggtgtgtgtgtgtgtgtgtgtgtgtaggtatttcatactcacttggcccaaagtgtaggtgttttgtgcatttaccttacagagtcattaaaaaataatcatttcattgtgcatattcaaacgcactcaacaaaaaaggacaatgtatagtagttataaactcactgatcccggtaagaaagggacagtgttctggcctatatgtctggtatcagaatctggataataagtgatacatttttaaatgatgggttggtatctagccaagtggctaggttaaatttatgaaaactacaatagaggacaggaatgcacattcaaataagtgaaaaataaatcctaaatacgtgaaaaaattgctcactttcatggattattgaagtaggaatttaaggttccagattatatctatatctgtatctatctatctatctatatatacttatatgcaatttataatatttatgtatttaattataattccacaacttatatattaaacatatttatgttaaatattaaactcagtgcaggtaaaatacacttatatcctaaagctttgaaaactgttataaccctttcagaaagcaagaacagaaattttataatatgtatacaaatattaaagtgtttacaatcttgataattctactgctggaaatttactttaaatacatatcaacaataggtaaagctacattcagtagggtttttgttgttgtcatggtggtgttaaatttaatcgtataaatttaaaccatgcaagtaactaacactagagggaaaaataagtaaattattgcccctggatggactaatacttaagtacaataataatcatacagactatgcaataactggcccaaattcatggtaaaatattaatcaagaaaaagttgaagctataagaaaagtgattagcagagccaaacaaaactttagtaaaaattattgctggtttttaaattttttgtaatactgcttttatgttttgaagatgttgacaagagtttgagtccttcttgtccatatttaagtgtgagatacaattttccctggcctgagcacttcactccacgtagacagtaacaaagacaagtccgatttctccgaagggagtcaattcccatggtataactatctcccaaagcaccactaaggttgcagttagtttcctgagtatgcatcaaactcatgcaatccaggtctggaaattacacctgcccttcttgggaaccactccctctacatcaaaggactatccttggcacagtacagcaggggttgcagcccccagccctgagcacagccacgtcttcacatcatgaagccagattatcctgataaaaggacacagtctcatcaccaggcatatttttgttaaagcacaaatacccaatgtttcaacaatcaaataatcgctaaattaccaagccaagcaattgcttatggagaaagccacaaaaggaaaaggcatccttaacactctgatattaaaacaacaacaataaccaaaaaagactttccaagtttataattttttaaagtctgtgttttcctcatgttctcactcataggtgggagctgaactcgagaacacatggacacagggcagggaacatcacacaccggggcctgtggtgcagttgggggctgggggatggatagcattaggagaaatacctaatgtaaatgacgagttgatgggtgcaggaaaccaacatggcacatgtatacctatgtaacaaacctgcacattgtgcacatgtaccctagaacttaaaattttaaaaaaagaattttccagaaaaaaataaagtctgtgttttaaaaccagatatttattactctcttaaaatgtctcagggtaacatttttagttctgcaacagtgcagctaacattccgagaccagccatcgtgcaactgcccataaaaaaattaacaccatcaaggccatttttctgtgcttaagctcataccaatgaaaactaccctataggcataaacttgatatttctgttcaccacacattaacccagcgttcctcagagtgtgacacccaggtgacttctgtgatgcaaatttctaaaaatctggctggaaacctgcatgatcgaataccccactcatgacagggttcaaccattgatcttcgcttattttacccagcttgcacttagtcttggaagattaaccctttggcagggtgaattcacactgttaaacgcaaaggagtctctcctgagactcatgaaagtgccttagttcccagagtaggacccagagactactggagatctaacatgattcatgggagtcaaagagaagtggctaacatgggagttggggagagacataggctctggaaggaattgaatcacagattcctggagctacagaaaaccttagcagtcaccttagccctctcagtgcaccacacaactggttagtgagacaaactcaatgtagctttctttacattgtccccagaatgttttgaggtaaaagaaataggggcagaaggaacctggtcatagaaaaaaaattatatattattaaagaaacataatagcaaatgaggacaatatatgtaaagataatctttaaaacgttttctgacatggtcctggtatacattttaaattacatctgaatgctgaggagaccatcttagaagctggtgtggatgacgacttcccaataagaatgttaagaaagggagaaagcaaatcatttacacacctggccggcccctgtgaccttcaaaagtcactggctgcacattcagttgcacatacacttttgaaaaacttctctttgtctggcaatgtcattccccttaccccatccctcacacttttcaaatagaaagaaaagggtcatagggtgggcactggctgggtgcaggaggtctcgacctcaccacatctggtgagggcagaggaggggaggcagggaggactgcgggaaagagctggagcaagggtgagaggacagcaagctggccaaggagaaacacctcatccccttaactcctgcttgaagcatctacctcctccaaacacagaaatatgaaaaacaggtagtcagctacagaataggaaattgagatactttccaaggattcaagaggaagaggaatgcatgcatgagttggtcgtatttcagctgcccacatgccgttttatgtgggcacttagaacacattttctataacatccctttgccacaaataaggcatcagaacatttgttacaaagcaagggtatacaaaatacactatatgattttgtatatccaccaccacctgcatactcaaaatcacagagatagattaaaaaggatatagttcaaaatgttaaagccatatatgctgtgtaggagcactttaccaaattacctttgttgcagtcgctgaagttctcatcacaaagagtaaaaaccatcatgcttccacatagaaataagcaaattgcatcagtgaaatataaccaggaagagaaaaggaattcaacctcccccatcaacactaaaactagtcaataattatctaagtggtatcagttatgttttctgcgcatcctggttggcctctaagtaaagagaaggagccggagagaagggcttgggaatgctacggtttctctatagcagttttatcttaggcggtgtgtgtgaagactagggtgtatgcagcgagtaatctgcatgtttactgcgtcaacattctacccacttctgggtagaatcgttgctcatcctaatcacattcaaaggccccatagggcagcaagaagttcctacttactggcaatttagctcttggaaacccttgaagaggatggttttgtccctgtgtgctatcatggctgtgtggaggccactaagccagctcacagctaaaattcaacaggcaggaatgactcacacctctccaaagcttttttttttttttttttttgagatggagtatcattctgttgcccaggctggagtgcagtggtatgatctcagctcactgcaacctctgcctcccgggttcaagtgagtctcctgcctcagcctcccaagtagctgggattacaggcacatgccaccacgcccagctaatttttgcatttttagtagagacagggtttcaccatgttggccaggctggtctcaaactcctgacctcaggtgatctgccctcctcgacctcacaaagtgctgggattacaggcatgaggcactgtgcctggcctccaaagcttcctaaaaatgagtgaggagtactgccaatttaaaagtctgcctgatattcaatagaggaaagatacactttcaataaacattcacttgttttacgtgataatgtaaacttgataatgagaataagaaatctaataaggccattctgtaatgtatatcatgaactaagtatattttcctatttcttagcactacactgttttctggatctaagttgccaaaaatacctactagctgaatgtagcacaggggttgagcaggaagaaatcaaaaggttgaagcaaaacaaaccctggagaatagggtttgaattcaaattctggaggcacattaaataatgctaaatagaactaaagggggtagttttccttatgaaaagtctacaatataaatgttgaagtttctctagtcctatatgaatgtgataaaatgatctataaatgcactgtcaaatacggtagcaactagccacatatgacaatttaaagtgaaataattttttaaaatacagttaaaaattaagttcctcactcacgctagtgctcaatagctacataggactagcaactaccacattgaacagtgcagattacagaacattttcagcactgctgaaagttctattgggcatctcttattccagagcttaatagactttgaagtaatcatagatataaaatataaactaaaataaaaggcatcactccataaaagtgcacaagagggagtggcatatttaaaccataaagaacctttattctttctttggctcaatccttatttagaagggaaaaaatctcttccagaaaacaggtagggcaataactaggctaggtagcaaagtttctagcagagttctcattgaagtccttttacctgaaaaggcacaaatgtgtgtgtgtgtgtttcccctctgagttattcaaagcatgtacttatatggagaaatgcttaccataggacctgctaaaatagtatgaatggcccagagtagtgacattaagacaaggacttttaaaaagccaggaaatcaaaactaactggcaacatttgacctgatctcaaaacagattgctgcagaagggaacattcttacacagaaaggagccaactatacattttctatcctcatagggttagatatttatacacatttttatcactgaaatttatttaggattgaaatggttatctaggtgttgtcattgggtctgtttttggaaggtctcctgcctagggcgtttaaagtatgctatatcttgtgagcaggaagatttgataatgttccaaggtcacctgtgctggaacattgttaccctgctaaatatcttagttttctaatgatacgcaaatggcaatttaaaatacactatttaatttcactctcttcttttttcttttttactgctacaatttgatcatgtgtgtgcctccatgctcacaggttcagggtgttcacatgatataattataacagctatatgaaacaaagctccagaaactataccatgtgagttacagattaaatgggttggcaatgctggacacaataccagttctcaaaagtactcctgattctaacaagtaaagttgtaataaattaagagggctggtatttacataagtaaatatgaaatttcaaagctatatgtgaattcccatgctgaattgaattcttactaacacaacatgtattcttttttttaacgcagatgatagccttgttaaaactagggaatgctcactggcatatttacttcttgtggattctaaggtgcctttactgatgactgaaatctagctatgttagaataagagtcacttgaatatatttagcactttataaagcaatggtaacatataacactgcatttgtctgccatagccacacatcaagtatttatggtaggtggtattttgaaagtggggggtaaaaagatcaggttggttaagttatgtgcctaaggacttcaagccttacatttatttttaaaaataatcttaacacacaagtaatacgagactatgtttttgtttaaaaatgtcctatggccgggcgcagtggctcacgcctgtaatcccagcactttgggaggccaaggcaggaggatcacctgagatcaggaatttgagatcagcctggccagaatggtgaaaccccgtctctattaaaaatagaaaaaattagccaggcacggtggcgcgtgcctgttttcccacctactcgggaggctgaggcaggataattgcttgaaaccgggaggcagaggttgcagtgagctgagatcatgccactgcactccagcctgggcaacagacccagactctgcctcaaaaaaaaaaaaaaaaaaaaaaagtctacaacatgacatatgaagctaaagcccctagaaccacaactcaatctatgtctgctccctctcctcaaaggcaaccactgttatcaggtgatgtgtactagatcttctttatgcctttgcaaccattcacccttatccaagaaggtacgcataagaagatctggtgcagcattgtttatagaaacaaaaaacaatgtaatcaccttaaatatccaaaaactagagattaaccaaactaaatgtaatttaaaacaatgtagcaagcctatattaaataatttgaagtttctaaagtgcatagcaagtgcgtagcacagagtgagcattatataaagtatctactattattataaggcacaacatatttaatgaaaaacacaaactgcaaaaagacatacaacatgagctaatttatgttacacacacacacacacacacacacacacacacacacaagtgctgtcataattttctaggagtaccaggatttcactccatgaggctacttcccctcttttagattatgaggatactttcaaactacatcaggcagcattatagagtaagagagaaaatgggtatgtatattatatctgcctcaatgtgtttctctggtcttcatccttagtattacaggtgaagggtattcaagggtattcaagaatagttcattttcttcttgactccgtaagcacaggaggagctcaaacatactacctccctgaaaacaaaaaagggataagaaacactttcttacttaagaaagaaaaacttaagagagaaaaaacaaagtcgaatgagcataaactgtctcatcaggttctaattcttctgtttctatgcagaagtttttttcagataaatcttaatgtagcctaaaacgaaagaattgtgctctatgaagcagaggactctgaaaagggaaccaaagatgaattttagtccagctccatcactctcccagttgagcacagagccagtcccctaacctccctataccagggactttggacatagtcttttattatttccacattgcctaatgggggtcctttcttcatgatcatgcatgtcctttacaaatgaagcttcctttgaagacaggcaagagatcagatcaagccttccaatatttattactttggtttcctcttggttcactgttctcacaatggctaattctccaaggggtcccagatgtgaactctgctctaactattaaatatgactgtaacaagggaactcacaccgcaaaacattcttcttgacttccaaccagggtttctcccaaagagatgcccctgtaccatctgctccagaaaagcgcaaatccattccattaatcatggacgtctcagagttttctttcctaaccctgaagttcctggttcaaagtttctaaagtggaccaacttagtagagaaataaaacagttgctatatttacaaacacagtatcaagcacaattcctgaaacaaagtgaactctccagaaacattcactgaatgaatgatggcacgccttaactaataacaatgtatagggatcttatttgttcattttcttcatgtttttcatcaggctctgtaccaacatatacagaaattctctcttatttctcactctctcttaaaaggaccacattagccttaagcctcctgacattcctgggctatcatcggaatttcatgcacaacccaagccaggccttgatcttgccaaaaatctctggtgatttattcagtctgcatattggacaagtccagttctacaagtcatttagatccagtcctaaatgcctttaactgggatcaattttatttttagtagttgaatataaactttaaaccacagtgaatgcagtaaaccaaatgaatgcagtaaaaacttggtggcttccaaatttattttgagaattgtaacataaaagccaacatagaaaattaaagctttcaaataatctcagaaacagtacctgctaaggatggtttccaaaggttagctggaaagttttatcaggttcatctatataactacaagattcttcatcttaattctctcataatctgtctgataaccaatgtactagaatgacagacaacaacataaggaaaaggtagagctgaatagtcaatggaaatgctttagcagtcttggccagcacagtccaaagggagcaatgaaggttcctgatgcatgacgaactcaagctccttctggtcggtcccttgccttattcactgtttgagcatttatttaaccttgaagagacaagtcatatattgggaactgtccagttttttccagaggtgtggagacactaaaaacattcagtactttgaaagcaccaacattccaaatatgaactatgttgcactgtgctctggcctaggcaggctcaggagtgcttgctgagtcacttctgaatgaaagggataaaaactatgcccccatcatttgatacaattttaggttagattaagaagtcattcattcagatttggcttagttcactcaaatgtgtttctaccttggtctctactttcaatttctaagcattctctccaaattaggcaggagctttgctcctcctcacatcaaccaccaccataataaaccaggatcttcacaacttagaattggtttagggctcctgaccccaaatctcaatctttcttgaggtttgaatcatgcctttgtcttatatttagaatccaatgtcttgttcactgtctggaacattggaattagctgggtcagtttcttcctcaccacattcccctccttccccccactacacaaaaaagaccagagtaagttgcttgttacgtagttgttcagtgggaaatatgttttacaaatgaggggaggaaaagaggagggaaagcgggtaagtaggtagtagtagaacagaaagggaaatttggggagcagaagagagcaaaagaagaaaagggaaacttctagattcctgataatagaaaagctagagaatttcattcctgaaaattaaagatattttacacgtttgtgcatgtatgtggctttgtgtttatacacataccgttttgtttcatgtagcataatcaaatctattgctaattgtttagttaatatttacttattcaaacatgtttttaacatcttgcccaatattcaatctacattttacttagcaattagcttctctggcaacttgctgttttgttttctttttttaacaaaaacgaatactgatgttctaacagaacagtcttactgccccctttggctattgtcgtttctcttgcttccccaaaggcaaaagctctgctattttgcttgcaaacacaagactgatatttcattgttgttacaaaagggtcaagatttttaaaagcaccaccctttaaagttctttcatggagatctcagaaatgaacagcagtctcacagaaattgcagaacagaagcagaggagagaaatacaaatgggccagctaacattatcagtcatgtcacccagactgttactcttctgaatgaaataaattggcaagaagggaaagaaatgtctgtggaacatgccacgggatgaggcacaatctagagttaggacctccctttgcttttactgtaagcatgccattggtcaagatcagctaaataaactgctctgcaatttccatgcattctttaaccataatatgattacctttaacaatctttttgtgaaatccaggcaaatatccaagcctacttattttattttccagttttgtaactatttaccaacctcacatactaatccaacaatgattgtagttatatcaggcatctagtgtattcattcaacaaatatttatgtaaggaacatttcctgctatctcactagattgtaaaaacttttgtcactagatctagtaaagaaatagaacagatttagaaatgaaattccatggaagcaaaagagcaagcacactatattggaaaatgtgagatgtttggggtagatgaaatacagtgtctaaagctaaatagggaggggttgtggccacagtgtaggctgtagctggaggtatggatgaaggggacaggtcaaactgtgaagtccctaatatgctgtgctcaaaaactgcatttgatcatattggaaattgaacaccattgtgggcctttaaaggtgggaacagcataatgacattgtattttagacagaaagaactgatgccagtgggagaggctgatggcaaataagagatgccaacaatctggggctgttgtgatggcccagcagagagacacagatggctcgaatggaagcagcagaagtgaaatcgagaagagaacatatttgagagaagtttagaaaggagaatgactgattaactcttcgtggtattatgattgctctcctcccgcaggaaccagtcataaccaatttcaaagcctttggcttggaatgtcctaaacacattgcacaaagctactctgcatggttatctttaatcacgtcacataggaaccaattatgatgtagaatgttgccactcaaagtgtgatctttggagaaaagcattatcacctactggaaacctgtgagaaatgcagaatctccatccccaccccagaaatgctgaatcggattctgcgtttaatcaaggacctcaggtaaatcacattcacattgccatctgaggagtactaacgtagaggaagtatctctgggtgtagaaatagcgggaccctggttaagtcacttacttattgaaattttcatttcttctccacaaaattgggaaacatatactgattggctgtaagagtgagactgtgataaattgtgtgaaaatgctttgtgaactctaaagcatgatcccagatagatttaaattcatttttatcattgtgcttgtcttgtcatgcatcaaaatcatatgtttgatttatttgcaaaagacttcattgagggctgggcattgtggctcatgcctgtaatcccagcactttgggaggctgaggcaggtggatagcttgagctcaagagttcaaagccaacctgggcaacatggcaaaaccccatctctataaaaaattacaaaaattagctgggtgtggtggcatgtacctgcagtcccaactacttgggaggctgagattagaatatcacctgagcccaggaggttgatgctacagtgagctgagattgtaacactgcatttcagcctgggtgacaatgagatcctgtctcaaaaaaaaattttttttaaaaaaagacttaattgaaccgtaaatatggaagtggtaaaaggaatgcatttgcagagaaaatatcaaaactttagtcacctgggtttttgttgttgttttgcacattatttccttgggactatattgccaacctccaagctttctatgaattcacaaaacctacatcctcctctctactgaaacaaagaagaggagaaagaataacaatgttaagcactgaatattcgataaacctaaggaacttaccattaccatatttttttcttggtcaaatatctattatctctaaaagtaaacccaaattccagcacttaattaggttcctgggggaggatatagaattgtttaaaatagagtataagcctatttgtctgtattgtctcatccagaaaggaaatgagatcaaccagataaccttcttggattccttcaagtgttgactccacagtaccttattttcaaggtcaagcaagtaagcaatatgcacaggagtagcccatgaagtgcgatttgagggatatcgagttgctaaaccctgaagaaggtatccccccagatatgctgcatagacctacaattagaccccaaatctagggagaagataacatgtctgtgtcagggtcttttataaaatatattctgtctagcacattgccacatgctatgaataatgaatttattaaatagaccacttttatttagcagctgtaaaggaaagagaaagtatttgtttatttatttactcatttattcattctttgctgtatatttattaggtgcccaaatgtgaccgacgctgccattcacagtaaaaggccaaacaagatggccaggccctttgccctcattaagaatgtaatctagagctgtagtcctcaagcatttatcatcacatacccatcaataaaatttgttgagtgtgcacctccaatatgttaatatatttatttataaattaatcaattatgctactgtactaatatataatatgatataataatatgtatattgataaatccaaataaaaatatgagtgtataacagtagaaacagttcttaatttttttttttctgtgccccaatgcaaccactggcatatggccacccacttgagagatcccttttttacggtaatttctatgagaaacttttttttccatggggacaatgttattcaaagtatatgctgacttcaatcacatctagaattcgaacaaaagaagttatatgagttgctcaggatcagagattcaacctattttctctatctctctctagtaacttaaactgcacttagaatataatagatgttcagtaaatgattacagaatttagggagaaagggatgagggtttatggaagaaaatgaatacacttattacaaaaaaagaggtcaggcatggtggctcatgcctgtaatcccagcattttgggaggccaaggcagaatgatcacttgagcccagggcttcaagaccagcctgggcaatatagtgagacctcatctctgcaaaaaatttaaaaattaactggatgtggcagcatcactacactccagccctggtgacagaacaagaccccatctcaaaaaaaaaagagataattatttgtataataagaaaaaaatagcttgcttgccaggaaaaataatacattgcctcaattatttaaacaataataagacagaataatactcatatgataaagaatgtacctcccagctcactttcatttgtgaagatgaaatttctaattatagatctcatctccagaatttctgggtacaattttactggcatctctctcatatttaatggacaatacatcaattttactctaagtagtgaaattatttctgaaatgcatttacatgtaggttccttaaaattatttaccttgcccacaattcattgaaaaaggaaatggtgatagagttacatagttacctggcctcttagctggcccctatcaccattgcctttgttcaaaatcacctgtattttttttctggcaaatggcttctactgatagttggtaatactaatatttgtgtcatgttatcaaaaacatttcccaagactcatggttgcagtgttatcaataatagatttatctgttacatcaaagttttggtgtaataaacttatcaccatttccactagttttccccacactcactgtcagcctggacaaaaggtgctttgtaaagagtgtcccattcgaaatagttccttcaggtgcacaggccaattgctggtgccaggctttgtgcccagtcttctctgctgagttcagagctctcccatcaagactctgcccaaggagagccttccacactccaagaaccatgcgataagggaaaatgaagtttaggttacgacacagggaactgcatttacgataccgcctgctcccagatactgccatctggcatgtataattacctttcggaaaccacggggtcacattctagcagcctccttcgtggtcttgggaatcctgagcgttgagattaggatccctgatcactctgggcagggatgcactctagcctaagaagtctatttttccctcagcttaatcctgagggtctccaaagttccaaactggtggaggagaaggatttttcccaggaacattctcccctttaacaaataattaggcctctctcacaatcttaaatttcaaataggccctgaatctccaagcaatgctgacatcctttttttaaagtatatgagcgcacacacacacacacacacacaaatgtgtgtgtatatacaaatgtatagataaatatccatatatatatgctaagaatgtgctgctcacaaaagttgtatatgataggtcttataattctcttgtaaaaaataaggacatagaggttcacaaagcttaaagcactcatcaaaagtcccatcactaggagtcaaaggtgaatgacacagtgaaataataactacaaaattcttaatttattatcatataatttctcatgttagtgttgccataattatcactgagttttacatgtatataagacaccagtacttccatggacattgcagtcctcctcaccatctcgggcagtgaccccacctttcaggaagtgggagaggggaggttgcccttcacaacaggatccatggtgtggcccccatggtgtgaaaggaggttagtccccagcggtgactctttcatcaccaggagaaatctgacctctctttcagatgtgtgtaaagttataaaagccttaaaaattttttttaacttcttcttaccgagtattggactttgaattcctctctacctaactccccagggccctcaggaggcttctgggccattatgaaaagtgtttgtagagccgtgtctgtgccatggtggacaggcagcacagacacaggctggacaataacagctgagctgcagacgctctgcagccctgcttctgtggcgttttgacagtgccttttcaacacatgaacattatttctcagagccctaatcccatggtccttattaaattttccatgtcccacagaccccaccagagctttctgtcccacctgaagaatactctgcgctcccaggataaacaacatttgataagaagctgacttagaactacatagagtttcacattcaaacaaatggtcagctgaatttgcatgcaatagcaagttgaatctccgaacttccttcatatctggtatcttgtagaatttcagctacaagtgtgtgactgcagtaaacagagccagcttggggaaaaggtgaaagacgccaaggaaacctccactcaaacaatattgtgaaaaatattctgattagttaagataagatgtactctcattttcctgagagttttatctttattagataggctgcacaatccgtaacaaagtcttagctgagcgttttggagctggttgttattttcaaatagcatgtgctatggtgtttccttgggggaatgcattccaatttcttaatggggtgtaatcagtaacatgtttgcttcaggccttataatgatgatgctgttaactacattcaacaaaaatcctttaaaacagctgttttcaaccaactttcgctgtgaatgtacttttgtgtgtttaatgtacttggcaagcatttgaaaaagcccttgcctactgttttatttgtttccatttatgaaaacatgcattcgctgtgaaaatcagatgcatttgtaaagttatcaaggaacccataagaaaatctaccctctccttgccatcatcagcaatttctgaatcatccacagtgaaattcacttcgaagaaacttctgtggatttgtttaaccataaaatgatcagtagctcttcttgaggcaagaacagaatgaacgtatttcttgaactaagttctctcaggttaaatgagagagggacccagtagggctgcctggatgaggttcagaagcaaagatttccttctaggcagcttccccctctgctacctgggtgattcatacccaagttgttgaccaagccctgttgtctctatcacttattagtcttccactctgaaatgcaaaacttatcctcgatgcagagcctgagtaagaatagaataccttcccttcttgtaacattatccagccaggaaacaggcagcatgtactaatggttggtttaagtctggtctttgttttctgtcttccacggttgacaacgctccctgcaaggaatcaggccaaaataaaactgccaaccaccatagtgcataaaattgtaaaagcaggacaaaaaattccttgccatttttatgtccaccactccctagattagaaaggattgttgctatatgatcaacgtattaggttgtgttgttataggtatttgtaggagtcagggtgtacaattaaaaaacaaacaagcaaacagcaacagacccacattacagacatttgcctgctacctggtgagtcctcaaaagggaggtagcccggcaattccaacgccccgagaagaacccagaagctgttcttttccaatttgcctcccttattctgatctcatttcctcagtgctgaacttatacctttatctgaaatcactgggaaggcagctacttaaacaataagagaaactagtgcattgtttaatttgcctcttccatgagtcctaaataataaatctcacaacattccttgtactcggtgtgatactgaatgccaaaccccagctcggcagctggagtcctatttcctgggccctccgaagatagaaaatatcacatttctatttcattcgaccctttctctctctctgtcatgcttcgctgcctttacaagtcaccatttcactgttgccacaaagattacaaggaccctaacaggtaaggcctccaggaaacacggatggagagggcctgaaagaaaggcagaggactgccaggcttatctgctccctatctcaccattgcttaccacagggcctgtccactgacagccaagctgtcctgaggcaacagctcagtaataagatacacaacaaataatgttttttttgttttgctggaaaaatatatactcaggtaattaaattgttaacatgatggatgaccttattttatatttgaattcaaagtgactttctgtatcattcaactaaaatggcttgatgttattaaaaaaataaaaaacaaagcataattccagagaaatgggaatatagatttttgttgatttactttagaaacaaacatgggtagttgttactgtgctggattgtaatgtttacttgaaatgcatgaagctggtgttcaaatcctatattcatttttttcattcctaattatttgtacaattaggaattgtattttatggatacaattgttgtatccttaaaagtgaggccgtaaaaaaattgtcaataaatatgctttggtttatgcaggaagagcaagaacatattagagatacctactgttcagaaggttccagaagcagggcccttgtataggagtttaaaatgttaatggacatgcattccgcccacgttgaatcccatacgacaatatgttttgtgcccagggcatgattctgactaaatcaataaaccactctaagtctgataaaagttttacaaaatatccaagacatttagagtaattgttaacatctgctcattattcaacagtgtaagcaggtttagaagccagataaatatatttattcatcagcagccagcatgtcactgctacctcagtggtgatataaaacagtaagacattagaacttgccttagtcttgggttcagagaatacaaatgaaccattatggaaaaaacagaaaattctgctttctccatgttttacacttggggggtagggggagaaagaggaaagaggcaagttttagtaaaaaaaaaaaaaatcttgataatttactttgaactaaaaacctggggaataggcaagaaaaataaatataagaagtacaaatcttagagaaggaatctgatacaaatcattgctacaacataaagagtatctttcttctttattctccaaaacacaacttaattttgatttcttctttcatttcacaatataagaaagttatttctacactggaaggttaaaaatgggctttttgaatataacattgaaaaggttctatcagaatgaaattagttctttgagaatatttagcaattggcagttgatttgtcctgaaccaaaacgagcagcagagccatcatttaatagtaacaagaaaatactaatcaaatcacattcacgcttattggggtggggaggcatctgaagtggtattctatggggttttgttgttgtctcatgtaatctgctgcgtgtgcgtctgtgtgtgtgtgttccaagtgcccttccagtagtctcaatgacctccagtgatgctaatagatctcaagttaggtgttccgtcagtatttgaagcagagttgataattaactttcaactacctgtgttatcctcaatcacgattgtgtaaaatagattgcataaagttgcctcaaggttaactctttggtgaaggaataaatctgacaatatgccatcaacttcaacacagtccactaacaccagaccttagaaactttatgaactttttttatgaaagacaaaaggattccagagaagagagcaataaaaataagtcgctggtggacgtcgttgcatttatctgaagtacagttctataaactcactagcatgtgcttgcacagtgaatatcagatggtagacatttaataaaagttagttgaattgaatacctagaacaatactatatatctatatgtggtacccaaaacattctaagaaattagttgaaaacaacaggttttttgtttctatgaggaccagaagattagcaaggtagagatgagaaaattaacacagagatgctatctagctaattaaagctgtaaatgaaacaagaacctcctcgtggattgttctgctcactaacctgtaattatattgtcaattgcattaacttcattgcccactaatagagtaagtttcaagggaggcagccaatgttgggatggttacttatttttatgtcctaattaatcagtactgacaccaaaccacatccttccttcttgttcattatttaaatgacccatttatatggatgaacctctttgctttgtgcatttcattagcacattaacatgctttcaaaacaaaaagggttgtttctgcttcagcaaatactttgaacaaacagctacttgagctacccctgacaggctgtgcaaccctcatctcttactcggcatttgtattaggccaatggagagtttgactaaaatcaaatgattaccacttggctaaaaaaaattaactcctgatgagttttgtagtgctcgggcaggggaataaagaggaggaattagaaaatagaagcaggaattttaacttcccatctgaggttggaaaacaacttgtatttagctagttatttctttgtgtctcatatatggaaacctgaaaataagctttgccactaagtgaagttaaaccctgttgaagtcatcagattgaagcataatttaaaagtagcttggtgagcccacctctgggacatgactctcttcttgagaaggtaccaggaggagtgttaactattttggattgctgtagcattgccctttaatgaaaggttctatgcttagactacaccttgagaagccgacaacagtaaccttaagtatatcagccccgatactaccctaaacaatagtgttggagagaatagatgctttaatatgtccaaataaaacaaatcatttcccaaaaaaaaatcccttagaaaagacaaagcatgctgtatccaaatgttaataaagtctctgtacattatggggcacacttgagatatttttgggaaaaacacagtaactgggggaaaaaaactacaatcaaggttaatttgtatgtttaaagacgtcttataatgaaatcattttttaaaaagtcaacattatttaacccagatttattagttattcctttgagtatgatctcataattgcaaatatttcatgaattgctctataattttaaaataacctttaaacgtatatagaaaaaaagtgactttgtagagaccatgaatgtgcacccacaggatgcatgaaaaaaaataatagctccagacctacatgattatgtacttggacctgagatgagcctcccagtgacagccacatacacagattttaaaaatggcatgtttcagatgctgtggatgcaagtaaagagctgtgctcttaaaaactgttgggtgacttaaccaataaactctgatgatgctgatggtgtacattttaattttgaatagaattgtaccataaaagtgaataaagctgtatttctagatcataaatactgaaaatgctttgataatggcaaaaaatcatttctcgagttgggttgggtaaaattagttttcggtctatgttacatggagttctcttaaatgggatcatggactgtacttggatatggtggtggttttcatgtttcattctcatgaaaaaaattgcaatttttagaatgtagcagaacaaacaaaatcatgacttacactccatactttcatttacttttggtggttttctcacattttcaacagttaccagccacctgcctactaccactaccacctttgtggcctgggaatctatctctgctgaactccacttattaaaaggaaatccttctatatactttacctaaatcttgcatccttcagtcgaagctcatttcatattattcaaactttggtgaacagtagtccaacatcatcctccttattggaaaaatccattatttgaaaatagtcaataaatcaccctttatccttcatttcccccacttgaataagcccagctccctagggctttctccaaagtatgcagcctccaactcactatcaaggaagaactgagttcctgggaaaattagtcatatattataactaattgtaacatgacatattatagaagagtataataattattaattttaaacagtaaatataattgccctaaaacttggcttatactttcctctaaattcctcaggaaattctcaaatttctcctttacctcagcctacttcagaaatgctcaatcctctctgtcagtgtgggagatcagtttatatttaggagaagtgggcaaatgtctggtatggaacacatcaaaactaggaaaatctgttccctcataaactaagttaaaatttctaaaactaaaagacaagttaattaacccattggatatagtcattgttatagcatctattattgaaagtgggctctatttcaagcctcagatgtatagaacattctgaaatgtttttctaggcagtgcatacatgctgatccaataaaactttcttttgctttgtttagtatggagatagctactctgcatgtttcacatcagtatttgattctgtgtctaaatttgagtatcatcttgaatactaggtattctcctctgtagaatctgatcatgtgaataataccacagggagctgcatacttcaagcaaaaactcaagagctgatatttgtttcaacagattcacattttaaaatttattgtctaccatttgtgtatgaggcatgaaacatgacccttatactggaccacaaatgattatgcaactagtttggcgttttgtattttaaagagattggggctcatgctggtaatcccagcatttttttgggaggccgaggcaggtggatcacttgaggtcaggagtttgagagcagcctggccaacatggtgaaaccctgtctctactaaaaattcgaaaattagctgggcatggtggagtgcatctgtaatcccagctactcgggccagagaatcatttgaacccaggaggcagggtagcagtgagctgagatcgcacaaccacaccccagcctgggtgacagagtgagatgccatctcaaaataaaataaaataaagataatcataaacataaatgaaaagattgaactgatagatgatgaagcaagatctattcactgtgcaaggatgaaaggcccctacagaatcccttcctgaaactcaggattgattgtttcaaccctgtgatattctgctttctgaacaagatgccagaattctactgtgagctctgtgcaggctaatttaggagatgcaagatatctgttatctcccagtgatctctctgagccacaaggtcagattcaactgaatattaaggagggccctgaaaaggctcacagggccactttgagaaccataagggtgaagtgcatgacagctggttatgggaaggggagggtgaattctggtggtaccatctctacccagtgaccattcttgtcatcagggtttcctaaatcagcctaataggagactgaagatctgaattcgggtattgcagaatgtttgcagcctcccagggaatggaaaaagatctggatcaaattatattcaatttagaggcatgtggggcattctaatgatttccattgcccctgtggtcatcttgggtggtggagctcattaaggctcaatcacaaaaattagggctcagaggatgtcagacctaaaaaaggacccaatgtggaccacctaagctcagtgagatgaagtgacttatccaagacctcagctccaggccatcttataactaataataggtacctccatgactagcaaaggggtggctgacatttgtcttttaaatacctatcgcaggaggagtcagctagaacaaatcaacagagcatgccgagagtctgagagaaagttatctggcatgagcagtgctagttccagccaccatcatgactcttggaattccagagtaggttcctaactcaccttcatggtttcacgctcaccccaccgtctattcaccacacagccgtcagggtcttctcctggcttcccatcacattcagtccaaactcctcaccatggcctttgaggcccttcctctctgacctcactgctcctctctcattcattcgcactagcctcgtgtgtttggctttctggttctttgaaacatcaagttggtttcttcttcggccgccttggccttgctattctcttaggctgaaatgctttttctgaagctagccccatggctcactgttattcctttcaggtttctgttccagtgtccctgctcagaggggctacacctgacccctgctctaagtaccaaaccttctgtgtgctacaattccccctttactctttatccccttcctcatcttcacttttcttgatagcagttattattaccaaacattatatagttatttgtttctgtatttattcattttctttgcccctactaaaaagtccatgagggtatggagtttgtctagatttcagaatagtgcctggaacatagtaggtattcagcttatatttattgaatcaatgatttgatactttatgggattaccagccagtgtgatctacagtgtctagccccagtaacaggtgagagtcactgaaataacctgatcacagtcctcaggtggagacctcagcctgagaggctcagggctatttccaatcattcttgcattttctatcattttgcctaattctaacatttcctctttctaaccttgctctatcatgtcaactagaaactcattactgcatgtaggttatacacacacacttcttagaacaactatatgatttaagacaccctagtgattttattggtttatcattaactatttatgggttttttttggttagttgattagtgagtttttttttaagttgttgtatttccatttaaccttccaggatcttggttttctgtaatgtagaatagttatatcactatacttgccttatctacatgtctgttcaaagcttgcattaggttccgtattttaagatattttgagagaaaataatcattttagaaaatagtttctgggagagtttgcaatttctacaggcaggtgttttcaggggaaagttagccaaacacagagaaaaacattgcttttaactaatgtattgatcatttgggagggcactggcgtaaggtcacaaacaaagtaaaaatgttagccaagacaagactcaagaggggcagaagcagtagcctggtctctgctcaaatgtccccattgtatggagctgggtaaacaggcagctatgcagtctgttctgtcctctctcatcacatgggagagaagccactagaaaaacaaacaaacaaccaaatacagctcaaggcttatcagcctttaagttgatgaccttatactctgggatcccagccccagctctaaggagcttattggacaatgatgaatctaaaaatctgaagaagttcagtcaatcattgactctcaggacaatcataccctcctgcctcagtccttcttccaaaatctccagtacgtcctgactgtgcccaaacagagcttggtctgcttggacagagttctcagcagtttgggcttatattcatgctcttgcccatgcctgcttcactcaccacatcacatttgatccggatccacaagcaccctctttttcctccatttgctctgataaatgctttctcggtctttcttcctgctctagaagattatcttttctattgcttagttttctttatttaaaaaaaaatgttttctatcttaatgttacgtaaaatatgtgcattataattgagatggggattttcaaactgtcttcctgaggttcctcagagatcatcagaggaaagatatgagcacagacctttggctttgaacctcctgtcccactttcaccataggatctaggttgacttttatctattttatatattgggtttctgagtaagatattgtttaaagaaagatttcctattgcttttatttaaaagggttaaaaaaagttaaattacaataacacgtgactcgaaggatttgccaccacctggtggcagcatacccaaatttcaatgtacctaaatttttaaaagggttgagttgaatctgctattctaaaattataaagtggtatcagaaatgtctcagatgatgatgtataattatgaaaaaacattaaaaagtacaatatcactttcaaaatacaatatagtatttcaaagttgagatttttataaatgaattaaattactttattgtagggcatagtacttgtagaaaacatttccattatgcctttaaaacaacattgcaagaaggtaaaataaactagtagcattctctcaaattctttttatgtttgaacatcaatgttacctacctatcctcaaatatctggggaaaacttcatttcttcttcttctccttaaagtcaacataaatactcagtttctgggtaaattgtaccagggacattgcccgtgctgctctctacctccaccaaaacaaaacaaagcaaagacaccttttcacagaactttagaaatgactgcacaaagagaataaaaaacaagtattacaatcacaagtatattcatggacaagtggaggaagaaagtgaggttttgtttgatggtttgtttgcttgtttgttttcctttttcaggcctttcagctctcatacaacagtaacatattggttgaaccaactgaccttgctctggcctgattcaaccatagtctgttcagatagaacacctttagcactcaagaataggttccagtaacttaaacacctgatgagtgaaaagggaaatgaaacctgagcctcaccattctcaagtcacttttttgaccagacccacatagatgcctccccagcagtctgtagtggcccttgctttccccctccagctatgggactcctaagtcattgccctcttactcacaacaatgatcttaggttaagttttcaggcaggacatgagaaaatcagcaggacagacaagtggcatcctataacactcccagatctgtgagaacagagtgagtgggagtgagaagagcaagaacgccaaagaaatattcttggcggcaggctggtggacgcagaaggaaggtttagttatggtccctcaacagctgcaataaacttgctctgtaagaagccatgattatgttgtattgtggatttgccagcaagattacatccacacaagttctttgtagaccatcagtaaactcagggcattctgagcaaataggaattagctacatgggcagagttttcaactgaaatccacgcctagttcccctaaagattgtttaccagcttttcccagagccagttacaaggagcataacatgacttgattcacaaagaagtaatggaattatagtaataaaggagtgaggaaaataaataacaggaatagacttggcacttttgaaacttaaaggtgttttgcctgagatgaacctgagaactgacctacaatgcttctcatactcgtaaacatggtgcaaagtttgttttaatcatacagaatatgtcaccattaattctttaagcatgcaaagagcatatcatagcaaatattagacaccccagaggtgtaaactatagcttagaaaaacaaaactcattggtggctattactttgcaattgttagatgtcaccattgtcatttcatgttatagatctgtgtcacaacaacatctgtacaaaaccaaacaccaccagctgtgctctttcaacaatttggagcaataattaaattgtctttagtaatacacctgcactgcagatagacaaagccagtcccataaaattttacatgcttatttaaattcttcagaaagtttcaatgaaggatccaaacaaaccaaaaatgctaaagtatgtcaaaattgccatgtgagaaaacaagtacactgatacaaattaattagccttcctcctttggttataatctaacaggctacatcatacttgctgccttagctcctgggctattattgcctatctgagatcacttttgatactcctgaggtaaaggaacaccaaacagtagtcatttatctgacaaaagaccttgtgtttttcttattctatcaatcattaaacaagtaatgtctttttatgttattgctttgacattcattaacactcacgtcagaggaaatctttgcaattaaaaattctattgaccatgtaaggttgttttgcctgggtttgttacaactgattttttttttttaacagaagcaacagcactgaggcaggtcaggaacctaccacacagttcagcttgaggtatctcttctgactcaaatgctgctggtaattattaaaaaaatattattttaaaaaaaatcattttttctatctcaatgtaaacgtcaatgataatcttgactgatcagcttagcttaagaggaaagaatacctcagaaagacaaaagtcagagagccacaagactcttgtgttgttattaaattcttcctcatggcaaatgtgcaaactttcaggagagtttcaagtaataatctgaaaagtgtgctaaaatctcaaatgtttgaaataagttttacataaggtccttgtgatttgataccataaacagaaacagagtaggagaagtgcctaacatgacaaaaggagaattttgaatataccatagagtaacttgttcacttccaaaccactccttttgtgggaacatcaccataaaaactgattatacatcatccacggcaatattatcatccagcatcgggagaaataaacctgaacaaacacatttctttttaataaagagcaatttagagggtgggagaagaaccaatttccttcttggaaaaatctctgtgttataaaaatgtcttttatttacggagtggattagctttatggtatctgtatttatatgccttctactttacaaagaataaaacagaatggaaatcgatataaaaatacttcttaatatacaccatattaaatgttatcaatatgaagacacatatggttctctctttacatacaaagatacatatgtattaaatgttatatattaaatgagatatgtatattaaatgttatcaatatgaagatgcagagagaaatgtgtctttatattgataacatttcatatataatataatataaaccatattttgacatctattaatatttccatctatttatatatacatatctccttatactataattctagtatttaattaaattatattagtatttaattcaaatcaaagattgaatttggccctagggtactgtaatgatttgaagatacttagaatagaatgtgtcacatggattccatctccattctaagaatcaaattcaatcacaagaagacttgggacatgaaataatctgaatttatttattcattcaacaaactcttagtaaagacaccagtttagagacattgcagctgcactgaggaggaaacactacactcccctgtacgcacggggaagtgattttacctgcaggatgaccgaatgtgtggtttcaggaagtgaactataatggggttttaatgtcctttgggtcctgcctcagcattgttcattttcagtaaatgaaagcaatacaagctttgcaaagggatttcgaactataataggggaaacttagaaacgaatccagataccaccatggatataagattctgggaactacttatcttggagagatctttaatctgaaatcactgcaagtttcatgaatatttaaggagcaaagactcagagaagacagttaaagggaaaattgctgttggctgatttttaacaaatagatccttcctagaactcctagttctcactaggaattgcctcagagacaatttccacctatagtcattactcaaggattagagcccaagacaccacactcaggaggcccgtttattgcagacagatggttcaaaaagcagctctcccagcatgaagactgtaaacccgccgcccaaaccgaggccaagaggaggggctgggttccccacccagtgcacacccacgccagagctcctcaagattttccttcccgcccaggctgtggttgctcttccttcctcacctgattctaccaggatcaaaatgttcttggaataaaattaagtaaagattaggcctggagtataagattaggtcacccgatttgggtttgagtcgccattgtatcatttactaacagcttttccttcagcaaatcactcaagacctttcaaagtaaagttcaccccagtcagaccagacagaccccatctcaaagtcccctgaacccggaatctgatctacagagctcttttctactgaacttcatgaatcacagccccattccatatgcataattccatatatatcagcacactgctcagccactatggaattttaatgaccacattttcattcaaactgtgtattcactagaatagctaaacattttttctggttaatgtacctcaagttctgatgctatttggtctcctgctctttgccccacaaagaaatcaaatataaaaataaacaaattgcataattttttttacaaataggctggagagagccttcactatgaatgtggataagtattgatgtcacaaagctcttgattcttgattccttccatatcatttcactttcctttcccctccactccctcacatgtctgagacagccacgagtccctcatagaaaccttgcaaaacttaagggactcattgtttgtgctgtgcttcagaggtgagcctaactgagtgcactctgataatgtttttcaacaatttcatggattgtttcagatttatgtcagcctaagattattatctcttggccctcagcctattgccatgaagtcataacctttgtttaagagcagcctagcccactgtcataattacagatttgactctgttaataaagagaatgcaagccactaaagattgaatttctgctctcacagtaagaaaatgaatgatattttatagtaaataatcataatttacatactaagaagaaaccttagaatcttagatgatagcctctcttataaatcattcaaatagaaaacatttataaaatgatcttgcggcgtttatcaaatacctatggttatactatctcacaacattttagttaacccagttgactcaaaacagttataattgttcaaatgttctataccctcttaaagttttagactcatagtcttaatttcacacctgctgatgtaaaaacaatgaacaagtctaatcatggtagcacatgacagcccttcagatatttgaagctagtcctcatgtaccttctaagtgttctcttctaaaatatccttaggtccttccatttattgacatgatctcacttcttgctatctttgtgccctttctttggaagctttctagttcatgaatctctctctcaaaacatagtgtccccaaacaaagacgataacccaaacgggttccaaccagaggagagtacaacagagctaaccattaccccattaaatcaggtcactgtacttctatactggagcctggggttctattagcttttatagccactccaacaccttgttgggttatattatgatttgtcaaggcttcgctcaataagtggccctaaactaagacatgaacttttagttctgtttctcgtgctgtcactagttactgaattaacttgaagcaatctttcttagctctgtttctatattgtgggttcagtatttaaaccttagccacagctctcttttaacatgttagttggctaatgtggaattaattaaatatcggcgcgattctgttagataataacatatctcatcatcattctacacaatgttatgattattctctgaaagtgaaacagctgcacaaggtgagtgtctgactagattatgtctaacctgaacagactttattcctccaatcaaatcattttcctctccttcttaaagttgacaaagtgattatagaaatacagagatctgaatagaaggaaaatgtatgattcatatcatgtgaagcaagatgccacccaatccactctagggaaagttgggagaaaatatgtcttttattttttctatcataatgcagaaaataagcactagcagtgttgatagcctatggcttttcacttagaatcaacaatagtggcatgtcctatgattttactttttcaacaccatccccaaacaaagcaatgaaatgtaagatgatgtgaatgagaccctgaaatttaaggaggcagaataatggtttgcaggtgtgaacattattcatattttaaactaaattaaaattttccccattactctaggaaaatcaaataatgtaattaccaagaggtaagatgcttctgatatgtaaaagatatgctaattttgatgacagttttcagtcatgttaatcaagtaaagtatatttataggatttatattactgagaataataccaaggtgaaacttacaaactaatccttcatttatagcctattctgtaaaatttataaaccccaaatacaggatccttttatgtccatttccttcaagtataaatcaatatgatgggggcaacacaaaggaggggggcttagcactgacatcagtgcagcttgtttaaatacccagatgatgtttagaagactgtacttattctaggagatgtcaaagaggggtttttagtgaatatatgcctcctaaatgtcaatgattgctttaaaatgttccctctaggttatcaaatatgaagagagttccactaccttgcctttttaaacacaattggggcccgacaggactagacactccagcaatagctgaacttgaatatatacaatctgtatctgtggcttcaagacaagtagagaaaaggaagacacatgtccatgtatcaagtcctgttagaaatgtagcacagtcttagacaatagaagagaatcagtgattcaaggtagagcttggacacagtgccaatgctccagggcaggcagagggaccaggaatgccgtggggtggcacaacacctcctgctgtgaaaatggcagagtttgtttcccatggcccagtctgtgtgcctcagggttttgttgttgctgttggtttttctctaaaataaaaagaaatctggtgaattcaaacaattattacattataattatcgcctggttaatattgattgaaagaatgaatagaatgaatattttttgaaccagggaaaaactatgaacaaatataaattttaaaagtgtaatatttgccaggtgtggtggatcatgcctgtaatcccagcactttgggaggccgaggccggtggatcactgaggtcatgagttcaagaccagcctggccaacatgagcaaaccccatctctactaaaaatacaaaaattagctgggtgtggtggcaggcacctgtaatcccagctactcaggaggctgaggcaggagaatcagttgaacccaggagacagagattgcaatgagccgagattgtaccactgcactccagcctgggcaatagagggagactctgtctcaaaaaaaaaaagcgtaacattttagaaacaaactagattttactaaaccagataaaagattaacaacaaagaaaaatttgaacagagccaaaacctaaacacactgaggagtcctctttcagattattttcacatctttaatatttatttgaagagagatgacatatactcaactactcttacattatttctttctaagacaatgatcacccaaaaaggtcacatgaaaaacaccaccaataaatttatgtcaccgatcaagagaattctttggattttcactaaaagaaaccattttacatattttctacaaattccaagccaattgtctgtaacatcatcaaaagtctaacttcccccttcccacaaaacaagaaagttccttgccattctttcctctccatgtaatgacacacattgatggcattttcagaaaatttcactcatggaattcatggctaacccaacttgaaacagatatatatatatatatcacactactattcattcatttattcaatatatgtttactaaatgccaactctgtgcctgacctaaagattcataaaacagtggaggtggaagacatgttagaagtcattcataacagacgttgcaatatctgggaccttaagcggtagtgtaaagatgtgaacactcaagtgtaagataacagggagtggtgaaatccatgtgaaacaaaccacacagtccacttaaggcattcaaactcaatttctttctcttctgaaaactgtatcaaccagaagcagccccaaagttgtgagtatccaatcctgattttgtctaaccctttattttttcaaatactcaaaaagccaaatcctgtttccaataccataaatccagtgaattggaagctttatgcacctctctgccattttccctcactgtctcaaatcactaaatgactttgtttattggtttggtttttagtttatcttctttcctttggctatattggcctaatgccaaataaacagttccttctcaggaagaaaaggatgagcttctaaacaatgagatcagacactgctggttatcagagagggtcatgagaactcctgtgaatagctgcaagaaatgtggttgctttcaaaaaatatgaattttaagtccaagtgactacaaagcaatgaagctgcttttgtgtttgctcaagggaagcaatttcatcacccctcatgcatgagagatgggttctggaggaattttccaatcttctcacttccaatgaatcaattgaatcaaattatcagtatagttttgggctcagaaaatacttttaatagttaatccagctgtgcatgtaatgacagccttgatattttaaaataaatgtcaaagtgaagctatttccacgcacttctatacatcatctgttcagctggtgaattaatataaaaaattaattttagtgttgacttactttgtattttgttcccatgagaataattcagccaaatcaatacacctaaaagttttttatgtatcctcagttcctgttctttcaaccttattgacctctggttggagccaattgacaagtaataaaatgtataaaaatataaatttaatttaaaggatctaatgtgaatggtgatgaaacacaccattcttggaccctaggccacatttataagctgctggaccattcagaagttgaagtgctttccttatattttaaaaataagtattactgagctacacagaagataaaatggcagtctagctaaagcaacattaaatagaatatttcctatcacctcaatcaataacctgaaaattccgacaactttgaaaacattgttaccatagtattaagaacaaaataattaagaaagcctttcattagtttgctgattataaatataactttggtgtacttttttcctgttcctatatctttttaacttcctctgttttgtctcttaaaatgccatcttagagttagtttttataattagatatctctctttccactcaatttctctcctgaagcttgtgctgagtccctcctacgtgcaaggcactgtgctagggttcctggctcatagctgatactcaaaaaacatttgtaacgataagatctttgaaagggtagcttaagatttctttattctttcaccagtaaatttacactactgtgaaaggcaagacatttctaatcagaataaatgaggttagatacaataggtactgataggactcaataaatattaatagaattagtgaaggctcttttgaaaattaaaccccctgaaaaccgcatttttataggtttatttattgtggtagttacagtacactctgagaaggagctacttaattcataatataatcatattcagtgaagttaattaattccagattttattatgttacttgagctcactgagtgctttaatctcatgatataaggaggtggaaaaggtaggtgtaacaagtcatcacagaagccaaggagaatgataatgtgcatctcaattacgagacaaggactaataaatgattgcctaattgtgggggctggaaaaaaaatcccaacacaaggaagcccaaagcactttagaaatcagaccagatatctaagttccaaagtagcagaaaaaaagaacaaacatggagggcggcaggcagagagtgccttgccagtaaccagggcttccaagataatggtaaacttatgcaagaaataaacctgtcttacaatggacacgttgactgtcagcaccaaggcccagcccactggaaatcagagttgctgaaatatatgattagtgttctgtttcatgctcactttcatgccacacctttcagtggaggtcatctttcaagtcattaaataatctaagagtgatatgtacacagaagagtttgttccttatcttttgtatgtcacacctggtgctttccatggactctttgttctagctttaacaaagttgtgtaaaggtttttttttttccccttcccaatgacttacttcaactcagttttttaaccctgtaacaatggcagttattgggaatgtctctccacctagacacacattagttgttaacaaagataatatagaaaaacatattttgatttcaatattctctagtttggttaaagattttccttttataagtatatctaggtacattgttaccgctctgttcctttcaagtaaacatattaattcaatattactttgtaatataattctgatttaaatatcttttatgacactcatgcacaggtgtttaaagtaaagcattatcgaggtaataaaaaattcatgattatcttcctttgtataattatagctgaatattatgcaataagttcaatagatttttattaattaatatatactaagaaaatattaattcaactgatattctcaacattgctcatctcaagcctgtgtgatagataagacatattcatcccattcagcagatgaaaaatgaaaacttccaagaaattagatgacatataaaatagaaagaagtggcagaatccacagctgggctcagtggctcactcctgtaatcccagcactttgggaggccaaggtttacggatcacctgaggtcaggagtttgaggccagcctggccaatgtggggaaaccctgtctctacaaaaaatacaaaaattagctggacgtggtggtgggcacctgtaatcccagctactcaaaggctgaggcaggagaatcacttgaacctgagagacagaggttgcagtgagcagagatcatgccattgcactccagcctgggtgacaagagcaaaaatccagactagaacaagagccccctggattttcatccttcttgaaacatgcacagactctgagacacctcactgtcctggtttttctcctgctgctatggctgtatatgtctgtcatcctaaagggtttcttctttctccttctcaaagtgtgggcaaggcctagggctcagtcttctgccttcttctcctccttaccccacagggggtcccttccactatcacagctttaaatatcatatggaagttgatgactcccaaactcttatctccaacccagaccacttccttaggtgcagtctcacatatccaactgtccacttgatgccaacatttgggatttaacagccatgccaagtttaccatttgtaaaacaaaatttcagatttatccattccaaactggtttctctcttgatatttcatatcattgggcatggttccattgatcaaacaattaccctagtttccctcacactcctttactcctaacatcaataattcttagactttctttctccctccaaataaacctttaataatcccctttgcaatctattaccatcactctagttacagctgcatcatcacctccctagaattgcccccttcaatagcttctccacacaaacgccaaaataatcatttaaaaacagaatcattgtaatcccagtactgaggtggaaggatcacttgaacccaggaatttgagaccagcctgaacaataaggtgagactctgcctctaccaaaaattagctgggtgtggtggcatgtgcctgtggtcccggctacttgggaggctgagaggattgcttgagcccagaaggtcaacactgcagcaagccatgatcatgccactgcactcccatctgagcaacagggcaaggcctcatctcaaaagaataaataaataaaaataaatgcagcatcatgttaagatacatccttacttataagtgtaaatggcctcctgttaaatttttaaaatttaaagctattaataggtaacacattcaaatgtttctaaataaacaaatagtataaaaagataaacagtgaaaagcctccctaccatccttgtttcccatctacctagttccctcccactcctatagggaaccactgctcctagtttctgatgctccatagcaatttgaatacgacccaaacatcttatcctggccactgaggctacctgggccagatcctgctacttctccactctcatttcctttcactcttctccctactcatggtgttctactcctctcgctttctttggtctcatgaattaaccaaattatttcctgattcaagtatttacccacactatttactttagttaggttactcttcccctttcttctatattctcctggtcccctccctcactgccatttcacagcaaggtagattctccttcactacttatttagcaaactgattacaagttgtaattatacgtaaatgtgttgacttgttccctaattgtctcttttactagatgataaactccaggagagcaagtgctgggcctatgtattttactattgtgctgctggtacaccaagttacttagagaaggtgctcaataaatattcactaaagtgaatcaattaacactatctatgtaaacattgggaatgtaattaagcatttcctgaatattggtatttacagatacagtgagacatattatataaattgggagttataaggaactccctctctccaaaaaagtgagaaggtaatgttcttaaataattctatgtgttaaagaatgtcatggttttgtacacaagggctgctctaggcataataaatattctatctactgttcaaaaataaagggcaaataagaattacatattttgatgtgacatcttacaacaatatatttataaatttaaagccactgcatataacttcatgcattgtaacaaaatttatttgtcaatcgtcacttaagaattttgttcattctcttgcacatgctattattttttatccaaataaaggtatttaactcaacaaaattttaggaaaaaaacacttttaagggtgagcaaactgtttatttcttctttcctttttaaaaaagggagtgtctgatgctttgccctgagtgagcttgttatgatcaactgaattctctccccataaaagacacgtcttccttctcatcctgagtgtgactgtacatcgatggacacttccagacatttccctttcagatatcaaaaggaagtattaatcaaacaaaagatgggaaattatgacattccaccactaaggtttaactcaagtggccaagttttagctgatcacagggtacaggtgactatccatcatataacccatcataacacacattaaaacgtctgggttaatcaggacagaagccaaaaataatatattttgctgacgttcaatgaagactaccaaaggaattcccctgaaaccggactctataaacatgcaagatctaaaagaaaaaaggatatgaaaggaattctgagtaacactattttaaacaaagcagcagtacattcttttgacaaaaaaacctaaatggtttctatgacatatgcaagtttaaatttaaaaaatggtaaaataatctcagaagtccatgtgagtatgcaaatgtatatttgcatatttttatcttataaaaattatcagagaattgaataaactcattcaagatatatgaataatattcacaaccaggcataaacttctgatatcatcatacacccattttctttttcagtcctttcttccaaaaactaacttcatctggaaatcaatgacaattacatatagagggaaacagaaagctgtgggatgtaaccttaaaaggaaacatatcttctctttattattaggatttttacagcttttcattacaaatactctcatttcctggaaatggctttatttccatatctggaataggctttatttccatatctgcctcaactcttatcttaagctcatataaccacccatatcacagtttggggtaattcttgttgaagcatcacggtgtaagagataaagcactaactggagagtcaggaacttgagtcttgcttcccgttgtgctaccacatgacagcactaaggcaaactcatgtcgccaccttgagcctcagtttcctcacctgtaaagcgagagtgtgggctggatgatgtctgcagaccctgtcaggatgtgtgatgctatgaagtgccttagaagcagctattgtgatcaccacgggcaaaaccaaacattccagcacagcacacatcaggaccggggaagaggccatttaaatgcaggacaagtgtggccttggacccttttcccattttctgttcattgacagactgttaatacccagtgttccttaactctctgtaactactaaaagtaaccaaagcacacaattcccttgagccattttgcaattttttccaataacattgtgtctttataagattaaagacattttttcccaattagaaaaaatccataattctttttcacatttcacatattcgtacacattcaacatccagtccataaacatgcgctgagcacctattatatgtgattcatgtgttaggcctgaggtataaagtaaaaacacacagtctctgccttcttcagatcacttatattcaattgatcttatgaaatcgctgatactcagtcctttatgactcacaaagtggctattccatgtgtctcaacctaatagttttatagcaaattgtgtcatcaaacaggttaatctttcaaattatcataggcattttggaaagtcccattaattctggaaagtcattatgatgctgtttagtgatttcctagagaattgcctagcaaggttttggttgtttgctttgattttggcgtgtgtatctattgctgtcactctcgttcagaaacctacactaacaattatttggctcttctgtatttgtttcaatgccttttccataatcagttaataattgactgatctacagtctcctcagcattaattagttatgatgtgcacaccacacacacatgcacacatgcgatgacctgttctccttttaaatcttaagtacttctctttttcttcctaacagacatagctgtgttctttctcacagcttgtcttcttaaaaggattttagactgcttgagagtaggttcacagcctatgcttctttacatgacctgcagcctctatcccagggtcctgcatgcagtagacacaacaaaattaccaactaaatgataaattaaattacaaagggagacatctgattaagaagatacagtaatatccaaacatgaaagccgtgggaaaacaggtattacatttttgctaaccatggctgtggcagttatatcatgctctaatgctgttcttcacaatgactcttaaaaaaggtcacagtattgagttcttgggcatgtctagcacatcagagagctttgagcaccggataataactatattcaattatgtcagttggtacaagtaaatttccagctttgccttaggaaaggaaaatatttatcaggaaaatgaataataaggcttgcactgtgatacaataagagaaaaaaaacttggtaagtttatacaaagaccatggatagttcaaaatagccaactacaataatactttctttaaatgggactttctctcaaaataaacaaatagctgaaaacaccctaattttgaataactgtcttaaaatttgaatgatatacctatctaagcaaaatcaaaaacacttccccaaatgattagcttgtagtgcacatatcaattgctttatagtgcaagaaatgtcaaatggcactagaaacaataccatgctttcctgtacagtgcaagcatatttcttctttagacacagtttacataatacaggaaatggcttcatctggttcctggtctttttgatcaagtcaaaagccttaaagaaaaaaagtgtttcttttacattttactcttttttttttgtacttttgtttttcaaaaattacctttctctaaatttttaaaatgggaactggacaaggatggagagcaatatcctcttagaaatactttactaaaagacaagctcatgaccttcttcatgaattctgcaggtggccagaaatgaggaggaaaaagcctgtgattcaaaaaaaagttgataccgtggtttaagatgcaatgttcacattttaaaaaataataacccaaaggcctagatgtagggactatttggagtgtttgagaagcaaggtggccactgtggtgattacacaggagtaggtggtaggagatgaggtcagagaggagctgggcccagaccacgcggggctttgtgagcacggtaggaactttgcatttgactctgagttgggacgccactagagagtctggaactaacttatgtttttaatcagtcaccttggttgcaatgtggagaacagattatggcacaacaaagggtgaagcaaggagaccaaccaagtatagtatacactgccttcatttggcaagagatgatggtgatgttgaccagggtagtgcgattgacaagaagcagatgacaactatatttttaataaataaattgatgtgatttgatgattaatttgatgtagatgtgacagaatgagaagaggcaagaatgactgcaatttttttttttttttttttttgagttggagcctcactctgtcgcccaggctggagtgcagtggcgcgatctcggctcactgcaagctccgcctccagggttcacgccattctcctgcctcagcctcccgagtagctgggaccacaggtgcccgccaccatgcccggctaattttttgtatttttaatagagacggggtttcaccgtgttagacaggattagccaggatggtctcgatctcctgacctcgtgatccgcccgcctcggcctcccaaagtgccgggattacaggcgtgagccgccgtgcctggccaactccaatttttttttacctgagcacctaatagaataaggaggacactaggaggagcaggtctggggagagaggaaaaaccaaaagttcagttcttgacatgttaatattgagatgcctgttagtcatccatgtggggatgtcagctggtagttggatctccaaacgtggaattaaagggagagatctgggatagagatataaatttaggagtcatccaagtagggctggcatttgaaactgcgacattggaaagaaacactgccctggagaatgagcatgaagagagatgtgaaaagatctaagtactgagcatctgggtgctccaatacttaaagggtgaaaagaggacaagtaaccacaaaagcaagttgagacaaccagtgaaataagaagagaatcaaaagtaaatggtttgcaagaactcaagcaactagagtttttcaaaaaagaaagaaagaaagaaatgaataactgagtcaaagtgtaaaagtaaatagtatagaatgaggcctgaggattggccattggatttggcaacatgacagtaactgatggccctaaaaagagaatctctttgatgatgtgagatgaggttgggaaaaaaagagaaagtgtaaattgcagtgttttgctctaaagaggaggagaaaaataatgcaatagctggagtggtaagtagggtctagtgagatttgtttttgaggatggaagatagcacagtgtgttcatacactaatggaaatatctagcgggagagaaaatcagatgatactacagagagagggcagaatagctgaaggatgtctgcaggaggtgagagagaatgggatcccatgtacatggaaggaaattcaccttacactagagcaaggacaccaaggacagagtgacagaaggaaaggcagaataagaggggacagatacaggaggcttggttgatttggtgatgtggcatgtagatattttcatcttagtctagctcctcagtgaaataacagatatggttattatcagctgacagtgaagaggggaaaaggtatagaggttaaggtaaatagaagaaggtataaaatggttctttaagagaggtgcagaggaagagtaggtggagaatcagatcaaactagagcttgggaatggccagttgagaagtaagagaggtaaggatataagcaaagagtattcacaagtgatggactatggctaactagttaagacaactgaaccgggacaactgacaggaccaaacactgatcaagaaacagacttccattttatcaagtcacagaacttttggaatctatatgctaccacatcctaacctaacaacaaattcagaatgtaaggttccttatggacccagtcccatcttatttctgacttctcatactgtatgatctgctgtacacaattagctacactttgctagaacatccagagcttcctccttccttgtcttcttcacaaggtcagctccattcagccatttctcttctttggccattaattccacaattacttcactgaccacttcctacgatggatcaagaatgaattgaccatatggcatagtaactgtcttcctccaaaattgctgcacaatgcctggcacatacttagcacttctttatagatgaacaaataaatgaactcaaacatcagtcatccatgatcatttatctctaaagatggaatgagttaagaggaaaggggatttatagcacgtgcatagttcacagtctctgcttagtccatgttctgctccaatgtaacaccatcaatgtcacctgctaactaaaattagtgtttaattagttaaaataactttccaatttttacactgattttcattgtcttagtaattctcacaactaccttttgatagaaaagtatgagaagaagaaataagaagagaatgaagagaggacaataaaagatgcccaagaatgaaagtgggaaagagaagaaaagggaaaagaaagaagagaataaaacagagacagaaggggaactagggaagagtaaatggggagaaaaaaaagcaagcattggccgcagaaactgatagagaggaaaaggcaaaaagaagaatataggaaagggatattaattttagggcaacgatattcttacttaaaaagtgctaagggaagtttagaaatttctatgaggaagctggaggattctggaatatttatagttatcccttattctcctgaatatttatgaatatttatgaagatcaacaacaggcacatttgttaagtaactactatgtggaaaacactgtgcagggccctgtgtagttcccatgccttcaattcctcttaacagctactattatcctcactttacagatggggaaattgaggccctgagtaactttccaagacacagagtgagtgagattgttgatcctcagacccagtgccacccacgctgcttttgcaatccagatatgcctgcagaatagggtgggttctgagccagctgacagggctttcccacatctcccatcctcccaggccaagtccagagggcaactgagaagggcggcaggggagccaccaaaatcagccctgtagtccttgaccctaggaacctaaatgtgaaacagatgggacccagacactcatccaagtctcacactgtcctgtttggctcttttcacacttcattcggatatatctgtttattctttgtaaaatacagttgtgctcatgagttgagaatcaaagtacacagaccgagaccttttctagagatgtttggcctccttctttagcagcaaagaggatgggaaagagacaaattcaaccatcttactggtgactggaagaaaagttattaaaaagttaacagctttgtgtctttgcatgttaggtctttggacagcattttctgggagtgtatgtaacaagaataataaattcatggccatatactaccacagttccctccagcctcaatagtaatcagtaccatgggatctcaacacattgtcactgaacccaaagagcgccagattaaaaccagtttgcaattcctgtattcctttgtaataacaaaggaatcaaatatcatctagcgatggcatatatctattccatgaatgttaccagttaaccaaaattatacaacattggtgtaatgtcaccaatgtaatgacatagatatatttcattgctagatgctatataaaggcatagccccataacataaaaaaaattgcctaacacaggtaaagtcaaatatgagcctaaatatttaacaataaagttatttgttctttggtcaataattattttaccaacatattcaacaagagcctgtgctttcttaattaaaattagagttttagaaactaattaaaaaacaatagatttaaattgatgaatactaatgcttctgtaattcacaataatgtttaaggccaggacagaaaatagaaaaccatttgacagggcctgggctaaaagccatggatggcatccactgtttagtgttgtataatttacaaacttctgttctttcgacaactcaaagaatgaagttgccaaataaacacacagctcagaaacaacgcagaagaattaaaacaccctctcacatcttgttaaaaggtggtggccttaaataaaagaacagtatctataaactgcttgccaaaaatacccagatactaaacagtttcattataaaactattttaaatttctcaggatgcatttgagggtgaggcagtcatatcaacaaagtttgatgattttatattgtgtctatggctatgtaaaatgagataaggggcacaaatgtcccacagagaggagatctcatatgcattcacatatgtcaaacatttgtcactttaagaaaatatactttttttaagacagggtctcattctgtcacccagactggagtgcagtagcatgatcatggctcatggcagcctcgacctccccaggctcagatgatcctcccacctcagcctcccaagtagttgggaattataggcatgtgccaccacatctcactaatttttgtattttttgtggagacagagctttgccatgctgcccaggctggtcttgaactcctaagctcaagtgatctgcgtgccttggcctcccaaattgcagggattataggcatgagccactgcgcccggccaaaagacatatacttttaatcaagtttcattactgtgtgtcattagttaaaagaaaaatcctgcccattattcctcatttacatctgtctatcttagaattctcattatattggcaatcacaatacttggtaaattagatcaaaaagggcatgattccagagataagaaatggacttaactatttcccagcgtgagggaccttacaaagagtttattcaacagttttcttcacttattacggtcctcagagcaattaagtccagggataagggtttcagtggtatcagcaatattactggcttagagttgttatacgagttgtatttgttttatagaaactccttgccaattcttacattaaagttaaacaaatcactgaaatgataacactcaaaacgaattgaatgatactaaaaagtttcaaaactctgagttttcagaaaggttaaatagctttaaaaatgtggctggaggtttttttctttaatatgacaatcattatatgatactcaagttatggttaatatccttgaaaaaaaaatccttttgtcaactggtggtctgtggcttgagacttcactgaaaggtttcacttgaaaaggctatgaaaacatcagccactgatccagaagttctcaacagctcagagatgtaaggtcattcataattgtctccatccttctttcctctctccagagtataattacttcaagaaacgaaatcctggtttattttactgaaatccagaaactcactacttacatagcaacagctacttcccttatctctggtttaaatatccacaactgtcaccactcctaggacagtgactaatgcttagtgggtctaatttttagaacctacacaatttaaaaatatgagctaccattgactttcttcacagaattagaagaaaatgctttaaatgtcatgtggaagcaaaaaagagcccgtatagccaagacaatcctaagcaaaaagaacaaagctggaggcatcatgctacctggcttcaaactatactacaaggctacagtaaccaaaacagcatggtactggtaccaaaacagatatgtagaccaatggaacagaacaggggcctcagaaataacgccacacagctacaaccatctgatctttgacaaacctgacaaaaacaagcaatagggaaggattccctatttaataaatggtgctgggaaaactggcaagccacatgtagaaaacaaactggactccttccttacaccttacacaaagattaactcaagatggattaaagacttaaatgtaagacctaaaaccataaaaaccctagaagaaagcctaggcaataccattcaggacacagggatgggcaaagacttcatgactaaaacaccaaaagcaatggccacaaaagccgaaatacataaataggatctaattaaactaaagagcttctgcacagcaaaagaaactaccatcagagtgaacaggcaacctacagaatgggagaaaatttttgcaaactatccatctgacaaagggctaatatccagaatctacaaggaacttaaatttacaagaaaaaaacaaacaaccccatcaaaaagtgggtgaaggatatgaacagacacttctcaaaagaagacatttatgtgaccaacaaatatattaaaagaagctcaacatcactggtcattagggaaatgtaaatcaaaaccacaatgagataccatctcatgccagttagaatggcgatcattaagaagtcaggaaacgacagatgctggagaggatgtggataaataggaatgcttttacactgttgatggcagtgtaaattagttcaaccattgtggaagacagtatggcgattcctccaggatctaaaaccagaaataccatttgacccagcaatcccattactgggtatatacccaaaggattataaatcattctactataaagacacatgcagggctgggcacaatggctcatgtctgtaatcccagcactttgagaggcctaggcaggtggatcacctgaggtcaggagttcgagaccagcctggccaacatggtgaaacctcgtcgctattaaaaatacaaaaattagctgggcatggtggtgggtgcctgtaatcccagctactcgggaggtgaggcaggagaatcccttgaacctaggaggcagaggttgcagtgagccaagatcgcaccactgccctccagcctgggtgacagagtgagactctgtctaaaaaaaaaaaaaaaagacacatgcacatgtatgtttattgcagcactattcacaatagcaaacacttggaaacaacccaaatgcccatcagtgatcgactggataaagaaaatgtggtacatatacaccatgcaatactatgcagccataaaaaggatgagttcatgtcctttgcggggacatggatgaaactggaaaccattattctcagcaaactaacacaggaacagaaaaccaaacactgcatgttctcactcgtaagagggagttgaacaatgagaacacatggacatggggaagggaacaccacacactggggcctgtcagggggtggggggtaggggagggataacattaggagaaatacctaatatagatgacgggttgatgggtgcagcaaaccaccatggcatgtgtaaacctgcacattctgcacatgtatcctagaacttaaagtataataaaaaaaaaatcagcacaccactctttagtgtctataatgaattggtcatatggaaacagatgttaacggttgggaagaagagagaattgtgtaatggaaaaataacagagtttattttggaaatgagagtcttagctccatcatcagtagctgtgagaaagtgggaaagttatcaatctctcttctgccctatgtgtaaagtggggaaatgatacctacttcagagggttgttgtgtgaactaaatgagataaggtataacatgactgtggacacatgggtgatagaacctcaaccagttaactgtcttggttaacaagatgagagtcaagaaatatttcaaatgtatagcatcttattagaggtggagaaggagcttgtaaatcacctaaccagaccccttcacatgttcaaaggatttaacaagaggtcgtacggtgactttgcccagagcaatttcagaagagtagtagagataagacgattgtctagagaaataatagtagataaagaaatggagaaatggatgtagacaatccttttaagacgtgtgacgatgaagggaaggagagaaaaataagggattggatgcggattttagaatgtatgtgcctgttaggtctttttaggatgggagaatttgagcttttggatggttaaaggttaaggtcagatataattaggagaaacatatgtcatccaaaccagatgtttttgagggtaaaagaggatgctacttatgctgacacaataggaataaactgggactgtctgaggccagccagaaagtctggtgatcctaaggatacaaagtgatgttgaagacatacagagagaaagaaaaattgatgacgtaaggtccctgaggaggaaggataaagagggatctgagtagaggtatagttggtcaggaggaaacggtaattaaagactaaccctttcccaggttctagtcacagatctaaagccaatgacccccctgttttcagagagcttacaatttagtgcactgattatcatggtataagaggaaagaaggaagggaatgggatggtccaccagtggaagaacccataatattttcaagaaaacgtcctagaatttcaataggggacaagtgtattttgaaaagcatagtcaatattgtaattcagtgaaatgaaactgtattttctttcttttttattggccacatctttattttgacattttgagcaacactgtagagaactgttatattgtgtttttgtttttgcttcattattacaggaagacataagctaagaaattctgatggagtgataggaaaaagctgcccttttgtgagcatatattactttctaggttctgtgctagaatatattttataaatgaactgccagtaactggatgagaaatctgaggctcagaggggctaataacttaccagaaaataacccagggtctccatgaggggatttggcaatgggtctgtgcttcaaagctggtgtgcttcctgttggtaagtacagccatgccaggataggaaggccaccactctaatataattccatgaacattcatatctaagacactggaaggatgtacagtctatgctcaagaagtaaaacttattggacaaaaaatataaactactacattaaaagtaaattgtgaaatgctaaatggataggaaaagtgctgttagaatacaaagagtgggccgggtgaggtggctcactcctgtaatcccagcactttgggaggccaaggcaggtggatcacgaggtccggagattgagaccatcctggctaacacagtgaaacccagtctctactataaatcccaaaattagctgggcatggtggcacgcgcctttactcacagctacttgggaggctgaggcaggagaatcacttgagcccgggaaggtggaggttgcagtgagctgagattgcaacactgcactccagcctgggtgacagagcgagactccgtctcaaaaaaaaaaaagagtttaaatctggtttaactggttcaatctgatcagaaaatgtatctcagaaaagaaggtagctaaacaaagccttgaagagttgggcagtgactcttcagggagatggaatgtggacctatgtggttttgtggagggagggtgggacaagcgtggtcagggaggacttgcttaacacttaagggaggaggtcaaacatgaacagcagtacagatacaaggttcaattagttttaccaaaacatgagacatggcactagaaaagacagtggaagagacatttttggaaaggaaagaggaaagacactactcatggttgctgtcctaattaaatatcaaactaatgaaactggatttctttctgaagaacacagggagccaccgaagtgattttttttccagtttctgaggctgtccttccagagctgggattattaaaggacacacagtttctccatgtatctccagctttgcttacataatcttacaaaataatattggtttcttcacatgtggcaccccttgtcaacaccatcatttatttctgaactataagaagttacttgaatttctggtggtgtgatatgacacttggatttagcatgaaaattaactgaatctcgtgtgtgtttcctcttaggtggtactgagagtatttctaaccccacgatgttatctagacccaaatatttttcttctttattttctttatttgagatgtgatggaacctgccaatagaggtataaagataacacctatttggccagattgggaattaggtgcaagggctaacacccaattttattttattcattcacaaagaggctctagggctttgtcttttgtataccgctttattctccatactcattgacctccttggcagctcactagtctctcaataggctataggtgtaaagaactccttcattaaaaatcacatgaaaacttttttcccaagcctgaccaagacttatcaggatggaaccaactgaacaacttaataaagtttcctctttgaggagtgaaggactatacagttaattcttcctggagtgttcaccactgtaaaaagaaaaaaaaaattataaagacagcaaatgccaatgagtacctactaaaggtaaatgataccaattcatccactgagaagctcataaaaggccggccacagtggctcatgcctgtaatcccagaactttgggaggccgagtcaggcatatcacctgaggtcaggagttcaagaccagcctggccaacatggcaaaaccccatctctaataaaaatacaaaaattagccagccatgttggcatacacctgtaatcccagctacgtgggaggctgaggcaggagaatcacttgaacccggggggggcagagtttgcagtgagctgagattgcaccactacactccagcctgcatgacagagcaagactccggtaaaaaaaaaaaaaaaaaaaaaaaaaaaaagcagcagcaacagctcatacaatgatgaaacacattttaggaaaaaaagaaatggttttccagggaaaacatgtaatatcctgggaccaatctgttagaccttagacatgcagagtcatcatatgcactcacacatatgcttcacaactgttactgaaaccaggagagttatcctccctaggatctaccttgacccagaaggaaccagcttgaggaggtcagaaaccagtgctgagtaaagggccatcacttctttacccctccttcccccagtattgggtgtgtgtttcccttctagaggctttatttgggagttccatgtggtagtaaaatatgaagtcattagaaattcatcagtgaatgatggatttcctttggttgcacagccactgggtctgtcttcctgttccatggaagcacgtaggcatttggacggcctatgaattagagaagagagaggcagacagacaggcaggccagggaatgcttatctaaaagcaacagtatgtcaagatctcaatattgaacccagaaactaatttatggcaagcctaatgtttttcagtaaaagaacatgtaacagtttaccaaatgtgaccacagtctttctgcccaggaggccaccaaaggacctgaatgttgcctctacagcccttccctcaaacaatgcatccttgttccacagcctcccagctgtgacagccatgataaaaatggagattgtttttatactctatgtgctgtttgtacactgacagcagcatggttattcgccaaataatcagagtatgttggcatttttataaataaagtgcttgggtttgacagtaatctgtgcaaggaagacttggaggatggacaaaaatgtcttctttcccatgcagaggaaaaaagcctccttggctatttttcagcacactaacatctcttctgactaaaaggcagccaggagcatagctatgacatcagcccagccgaagcccagctctctccaaaaggacacagggaagtatttctttcctccatggcttgcaggaatgtgttcctggggcttcctgagttatacaagaaggattttatttcaccagagtaggggcatgggggtggagaggaaagagtgaggaactaacattcagcgaactcctatagtgctctgtgctcacacaggttgctttgtttcatcctcacgataaccctgggaggtgggtattattgtccccagtttactgatgaggaaaccaagcacactctcgtgtagtgaccaaggtgtgttcacagaaaccaacgcctagaagttgtcagaagtatagggatagtcagagtatgagaacgggagatacacacttctcctttaagaaaatcatcttcatggctggaggatttcaaacacacatgctctgctgcatactttcacatctgtcttgtcaaaaacattttttacaggtcttgaaatatttttatagacaatatctttcaaaagttcatttaggaaactctctgggtagagggaagatttaattattatttgacaaaggaacaaactgaccttctgagaatttcggcaacgtgccaaagtcccagctaatgactagaagaaagggactcggtgcagatcctcggattctccctcctctggttcactgtcttccgtgtcaccttattctgtctcattactgagcataacagaaacttagaaccaactttcctcctacaagtgcaggaagagactgaggacagtgggctggggctaatgccgttaacgcagtttgccaggaagaacttgttctgacagctagaagattcaactctgggtactttttactgagggtatttccacagcctcttccctaccacccccctcccttctctgccaactccctcatctcagcaaaatcaaatcacacctggtacagattgaagttaccttgcaaactgtgggtcctacagtaacagctcttcacactactcacagctcatattttccaggcagcagagtactaaatctaggatgatcaaaaccagatcttgaagtctaacctaccatgggtttgagaacccccttatgaatagtgaaaagttttcactgagctttgggcccagaggtgcacagaagcaccccgaggtggacactgcggagcacaccattcacagaacaggagcacagctacgggtccgcttgtttttgctttcggacagtcactggaatatctttctagcaaccaaccactggaaactggatgaggtgggctttggctggtgggttactattctgctagccaaattcccgatgaatgtttgcaagtgtttctatctgtaagaggattcagaaatactgaataaaggccatgacataacaactgaaaagtatctacctctcaccaccactttttaaggtgcattaaatagttcaagttgtccccttcataaagggtaaatttagcttaggataaatgtgtctgaagggtatgtgaagccccaagacattctactttaaagcatcttaacaccaacaaactttgattcttaacttagacactgttgaagaagatggaaaattgagttcaatactaacttggtgtttgatcctttaagaacactgaatgcactgtatcaactaacatatacaatcttctgacgtctgaatggcctttatttcctttctagaagttggccaacaaagtctgctgctcctttcagctcccctttaataaaggaagttaaataactttgaatgttatttatgattgggtcgggggtgatagttgccagatgtgagatacttcatgtaaactattaaaagataaagatccatgaagttgcgttgatttctacgaagaagaaatacaaaccaaagggtcaaaacaaacatttcagcttccataatgtgtagcactaaattcaacaaccctgtgtgcctgccactgggctaggcactagacatagcaatatgaaaaagatgagccataaaaggcttagaagccagcctagggcagagataacatggcacaataagggccacaccaatggtgtgtgtcaacagggctgtggaacacagagaaagaggagggattattctgtttagaaaaaaagctcaaggaagcctctcggtggaggcaacagttgaactaggctttggagataactaggatcttgttaaggatccaggggacagagagagaggagagccttctaggcagaaaacaacacaggcaaaacattagaagagaaaagatggatgcactctggatattctattcaaagaaacgaaaaattatgccacctgaacccttacagtatgttatttggaaaagtctattaatttcacatgtaaaaacattttccttgtgtacaagtaaatactgtaattgaagtgacagattagacatgtagaatttattatctgaaagaaaacctaatcaataggtatttcatttcaaaaagttaatgaaatattatagagagagtggccttttaagctttgatttttggattcagagaaagaacttaattttcagtgacaaggtcagtactagttgaatggtctccttttgcttcccacagaaatgaccgttctttcattcttgaattatttattaaaatcaggcttcaataatcggagtctatttaaacatttttttgtagatcagcaagttaaaaatcatgttgcctttgctatttttaccaccttcaaacggacagtaaagtacttgtgtgaaattaaatattaatttcatgaatatgtttgggtgtgtaacaaaattctctcttttcagttcgtgttaattaatattcaatgcaataagtacacatatgtttaatactattatcatcaaggaagggcagagggttcaagtcattgtaaaggacaatgtgggtatattttatctccttctaattagcaaaattagatgagcttctggaagattatttgaaagcaaaggtttgccaagcctactttcaataaacagctttatgctcccaatagcctaggactcaactcttagatgacaaaaataaatcttttggtacatccatcatggttaaagtaagccaattccaaggtcaactatagggtcagatgcaaaaggcttgccaaatagccacatatgcaaaatcatagacatcagctcatctgaaacaaatgctctaccttgcaaaacaaaaattatttagttgtttgcatttatggtcatgtatattaccatgaatttatggtaatgtacatatggtagtataggttgatttgggaacataatgaaaattatgtatcttttagccaaatggatgatattttcttacagaagttaaaaaataaaaattaaaaattagctggctgggcacggtggctcacgcctgtaatcccaacactttgggaggccaaggtgggcagatcacaaggtgaggagttcgagaccagcctggccaacatagagaaaccccgtctgtactaaaaatacaaaaattagccgggtatggtggcacatgcctgtagtctcagtcactcgggaggctgaggcgggagaattgcttgaagccaggaggcagaggttgcagtgagccaagaccacaccattgcactccagcaatggtgacgcagagtgagactgtgtctcaaaaaaaaaaaaaaaaaagaaaaaaaagcataaaaacattgacctgtctttttgccaagatctaggtcagagagtaaactgcatatatctttggcaatgtatataattcgatagacattacatacacactctatcattactgaggcagttcctctttcaaaaggatgtctttgttaaataaatgtgtcctcataactgcctttgagaaggagacatatgctgatcctataacactccacaccttctttgaagcccttaaatacttcacttcaaaagcatgtcctattttaattatatcatactggtacatgagagataaggtgatttctctacttcctgaatcaaaaggaacagcaggattagacagaaacagcacatcgactatcattttagctgtctcaagattacaacatttgagcattttgtttccatgctacaccctcctttcagtgtctatgaggaagtttctgcactttgtttgacccgactgaactttgtcacactggcttctcaccacccctgatgaagcaagccactaaatcttaccaactatctctttgttgtctcttgtatgttcccagcccctccttccaatcttaccaagccagttaagttgcacttttcaccttctccgttgacataaaatgaagtaactgcatttatttggatattgactgcacattttgtcaacatctcagattttataagtcaactagatcgtgtttcaaggcaaagtcctaaaatttcatagctcatctctatttgcttgctcagtgcaaagtaacgaaatgaaaaacccagaactccagagaaagtttgtttagtcttgtcatcatataactgaactaaattattctgcaccatgtgagtgttttaaaacattctattatggaaaaggaagctattagtttgttaaaatatacttaaatttgataggcatttaaccaatgtctatgaatgtatagtgtgcaggaacaaaaattattggatcactgaatgcaatatgaattaaatgttgtagaaaaagctgatgcagctttttctactagtgtctagtagctttttttcagtaatgtccacctactaaatgaaaatgttaggactacagggcctcgctcccaacttcagttgtatgggaaaacaaggtcaacctcctgttcgcttataagatagagaattgttgtacttgacacctggagacatgattgtcagagcttctaaaatatttcatggaatacattatctaaccatgttaatataaaacacgagacttgaggctatttacatctgagtacctgactttagaagaagatcctttactgttcaaaatactgtacggaacctactggtagatattgttagctccttacctagtatcctgagttttacacagaatcctctctggtgatgctacccattccgaagtaaagaaatgttatttaacatcaatatagaaacatactgatgaatatgcacatagattatctttgaaaacaaacacatttctcttttttagccttgggaaacattaactttttttaaaattagagattcatcttattacacttgatttgtgaaaaaaaattaattacaatgctacattctaatgattcaaaaaataattgaagtcagtctatcaggtggcccagaaattatgctataagctttaagctatattcaattgctgagttagatcaagattagaattttcctataatgcttctatttcggaagctgttttgtccattaaccaaagaagaagtctcaaaatgcttgggacattgttaccttcaaaactatgtggggagtgtgggcaagcaagtgcctgtttgtctgtgtgcaaaagtgaaccattgagcatccttttctaaggcactaagacgtgcccttaattcttaattctggagagctgttggaatcccactgaatgaagccatctaactcgctctgtccagtttatattgcctcctgagccagttcttgttcatagtaaagttgaattttataacctaccctgccccagtatttccttatataaatgggtgacaaagaggagttccattgcaatatttttaagagaaaattattttagatttgaattctgcaaaaattctggatacaggggaaactgttaaagcgctgctgcccactcatcccatgagcattttaaattatgtacaatatgccaatgagcatttaaagctgactaagaaagtgtgtcgacctataagaaccaagtgagggggtagagaagtaagcagattaccatgcagcatggcaagggccatgatagaagtatccacaaagtgttttgtgtgtcagcaaaagaaatatctaaatctatttcaagagtcaagaagactttcttaaaaaggggatgggtaggtggatttttatttttttttaggtggggtttctctctgttgcacaggctggagtacagtggtatgaacgcagctctctgtagccttgacctcccaggcttaagtgatcctcccacctcagcctcccgaatagctgagactgcaggtatctgccaccacgaccagctaattttttaaatttgtagagatggggtctcactatgttgcctgggctggtctggaactcctaggctcaagagattctccaaccttggcctccctaagtgctgggatttcaggcataagccaccacacccagcctacaggtggaatttttaagggtgattaggaattaactggacaaagaagagggaaagtctttgcaagtagaggaaagaatctgcttggagctcagataactattatttgaaaacataatgacatctagttcaaacttgtgactgagttccacagtagaattcacagaaaaaaaattattaaatataatatttccatcagtctgtgtctaaaagattaaaaaagagcaaataacaatcttaataaactgatgatagattatagcctcatctcttccaacatccgattctgtggaaatttgcatggacatctgaaatggttaagcaaaataagttttcttgtgtttttttataaacgcctagagcaatccatatttttcctcttgattttgacctttttccaaaaaaaaataaatgtaatctgtagaaaagaaatttcatattaccaaaataagtgacattttcatttaagtaatatcttccattataaaaagacattttactgaacttcgataataaagctttcattttatcctcttatgcacagaccctaaatttatataaatacatatttgtctatatatagaaatatatatgtaagttatagagctataaatgacaattgtagtgttcaattacctatatatttacagctaaagtataggtaaattttagataatgatgttgattattatgccaccacaaatgtgactacttctgcctctaataatactatcaatgataataactactaccccaccctgtttattatgttctagacactgtacaaacatcctaactatacattacatttaatccttataccactaccaccaagatatagatattaatctcattttgcaaatgagaaaactgaggcttacaaaagtcaaacaaattgtcattggccatacagttaataaagagaaaaggcaatctaaatatattgttactttaagctcccaactttaccacttactgattgtctgggttttgactctctgaacctagttttttctcacctaaagactgggaaccatacctacctaatacagtggttttgaatatgaactctaatgttatatataaagatacttgtaatacacaacagccataaaagtgttaattatcatccccatgaaaaagcaataaagaggatttatataataaaaacttgaaaacaatatatctacagaaataacttacagtagaatgataatagaaggcaggaatagcttactgtgagtgtttcttatagtttcataagtgtcataacacactggaagactatagaaatcttaaacacatcatttattgtaagtcccactgaagattgatctcaaaatacataggatgaaccacataaattgaccctactataaaaattcaaagggctttccagatacatctctctttttattttaatcttttaaaagcatgtttagattatattcatttgattttagtggagcttttctctaaaataaattgcctatacatgcacacactaacacatgtggaattccttttctgtaatcctcaaagaggcttttgattcttcttctgattctccaaaaaagagtcagtgagcaagtgagatgcgtactgggatttggatggctccagagtcactgcatacatttacatagaaaccagatggctgtggaaaatgtttcttttttatttaaaaaaaaaaaaaaaaaaggattattgaggtgtttctacagactcttatcctaaaatagataaaaagtgcaaatcaaaggcaaactaaagggaagtggcatccaaaatactgcagaagctcatcacagtttaaccacatatccctcagggggaaactcttaagaaagtcacattactaggacataggtaggaccttgtcctagagagtctggggctttcattattcagggaaaaggagggaagaaggaaaggggaaatcttggccaagaaagttgaaagtccttgcccttcgaaggcttattttttttttctccctgcaaaactaaccacaagtttataagatgggatgtttaagggacttcactttttaatcttgtaatattaattccctgaagctttgaactgacaggcaggccaatgtaaatgagccagaacgagagtcagagccagaatatttgttgtaccaagacaaaaaaatgtgttattagtgctcagtgattaatgagcatgcaagaggaagggatataacatgtataaaattgtcttggtacgtacatggtttacacaatataagggcaaaatacaatcgactttactacatactcatatatacacagatacccatatcttacagatgcatctgtaccatatgggacatttcatgtgaatttgcattcatgtttagcatttcaaaaaatgataaaaatctgaatagacattttacatttgtgaaatgtcacatacacacagtaaacaatgcttattcatcagtgcatttattggtttcctatactttaatgatattttgtcttaaataattcagattcagtacttagtggtaagttaatttcactggcaaaacaaattaaccaagtctatgctaacccatgcatggagtgacagtggaaaaatttagtaaggaatgccattataattcaaacaactagggaagaaaaaaaagcacagcattgaagaaaaaatactttttaacaaaagaaagttttctagaaaaatatgatattctaacaaaaacatagcatttcactttatgaaatttaaattaataatatccttttcctttatgtctgaccaccaaacatgttcagaagaatataaaggtctgcctacaaattatacatgtttataataaagcacatctagcatcaactattcatcaggattggctgaagccaaaaaaagagaaagttttgaggaagttagacatgatggggaggggtgtggagggacaagagatacagaggggtgacctgttaaccccatcaactgcaccatgtcaaagctgcaaatagctgtgattggccaagccagcgagaaggagaaaatagccactgtattttaggaattaaataaaatatagaataaataaaaggatggagacatagtaattacccacaataaacattagggagatgggggaattttcgtttggccagttgcttggttgacatccctccccaatttgatctcttcttattttcaaggctggatcccaaaactaaacaccaacaccactaccctaagcaatgaaaagcaaattatttgccgaataaaagtttcagatatgctattttcacattatttgtattacaagtaaatacaaattttaattttttaacttgttttatattatgataatataatgttttagcaatcattgttgcaggtaaagaaaacccaaaatcaatataaaacaaacaaatatgaaaacaaatcatttttgtgctgcttaggaaaaaggagttctacataacaactgtgctttccacttcttttcttttcactacttttttgtcttttcttcctgccctccctacctccccgccttccttccttctttccttccttccttctctccttccttccttccttcctccctccctccctcccttccttccttctttctttgtctttaaagcataagagcaaacccagacggtagcaattctgtttactctttttgaggcatctctctagaccttccttctgagtgttttctttcttttaataacactttcttaaaaaaaaataaataaaaaactttctagaatggaatgtgcaaattttgctggctctcttctgctttctcataggattaaatctgtaaagagttagttattggttttattaaccctaatatatccagtcaatttgcataactatttttagctactcatttgtattttcctcctttaaacaccaatatcattgttctggaatcaattctgctgctcaaaaggaaattgtacagaaagaggcaatgcagttaataattttatctttgttgatgtgctaattgggttcaaattaacacatatgcaaaatacggtgaagcaccggacattattagctcattccatctataaacatggttctcaaagttagaatcaccaggaaagctttataaagttctgataaatggatcctgttctcatagattttaatttgattgttcaggatgggccttggggatcagaagttttaaaactcctcaggtgattccaacctgcaagaaccacagaagacggagaacgctggttgatgaggagaaggtcattcattgcgagagagaaatagttgaggtcagagaggatgctgatcctgtataataagtacactgggaagacaatcaaatatttccaactcatctgtgattttcaaaacttgtttgttgaattaatcaggaaaaagaagaaaatagcaaataaataattgccattttacagtggcaaataaataatcacatgtatccctttggagccagtggcccaccaaaggtggagtctaaggagaaaatgagccatgtaatggaaaagatgcaattcttcagataagacaggtgaaaccatcatggggtctatctttggaatttaattacatagttacctatttagacttcccttgcatatctgcactccctcaatagaggtaacagagagttcaaaagaggaaaaatagtgttacaattctaaaagggctccagttctgctggcctgtggcaaataagaaagaaatggcccccactggtttatacaaaacgcagttcatttttttcaggggtttgtcattcctatgcttaggtggctatcattctatttttcactatgaatgttgagctctgctcaccactggactgaacaaggaagcagaagttggctatgagacaaaactactcacacacatcagacaagccatatgaaaacaacagagcaaaaacagccttcaaataaattgcactagtaagaagtttggaactatttgctgagagctcagcatttgtgatgatgaagactgatttaattttgaactaggaaagaaggcattttctgtattctctgtgctattttccttcagctcatgataatcttcctcagtccttttcctgaaacagaatacaattctgtccctctatggctctccttcagcatgtcaaaaattgaggtgagctcagcgtgcgcttggaaggttggggaagaacttttacgaaatgggcaaagtttgttccagggaaagcagagaagacatttgaatattccataagtgcaatcctcaatataagtatgtaaatatataactgagattcacacagtaaaagatgacttcagaaccccacagttgataggacttaaaatagttgaaacacctcaatttttgttacactgtgttataatatgtattcattatttatgtttcttttatttgttttaactcaaaatcatgtaaaatgatttggaagaaaagtttaacagtcagttttatgggtaattcatgcttgcatttgattcattattatgattgcatttaatatatgtatataatgaatttataaaacaaagaaatccattttactaaactatgatttcatattatcttaatacatttagaaacagaaaaattagttttggtgttcctatacattatatattacttaattattttagaggaataaggcaatggcagactttatgcaaactatgttttagagaatttgcgattttttagcgtttggttttgttagatatcaaaatggctttctggattcatctttggtgttactgtttctaatatcattttatataaaatagtaattgtggcccacttggactctttactctttttgcagaaatgttaaaattccagtgaaatcatacactattctatgtaagtcacaggaaaccatcttttcaaaaaatatgacacaaagtcttgtaataacatttcctgagtacaatctagggagcttctggggggccaaatgaagtcatagaagcagagcctcctgtaaaaagtgagaaatattaataaacacaatgtttctctctcatcaaataaaagctcaccacaaaggactacctcatggcctacaggaaaaaaaatttaatattgtaaagcattgcaatgaaaacattaaaagttacactattttttttttactgaggataatgttaaatctgaagaaactcaatataattcacttatcagtgcttgaaataaaatacatgtttaatatgcatcaattccaggccatttgtctcatgcttttaaaaggattctccattaaaacactgtatttcttccttaaaagttttgtgatgggtttccagccatttccgtttattgctacacagaagggaatgactgggcaggtaaattacttaaatagatggctgctaaatgagaatgaactttgactcatttaaattaactccaatatttattattaaaagcttgacaatgctcttggaaataatcaagcattaccactagaataaatgaattcaatgaaaaggactaaaaagtaacagcattttgtttcagagatactacctttatgtaaaaatcaaggatccataaaaggcttgatgaacattaccacagtgtaatatttgatagaaacatctcagtaactttagatattttttccgagagaaattcaatgcaagatactctgcaagtgactagaataactattttttaaaaagacaaagtagttaagttttatatgtaaattttaatgaaataggaagtgattctgtcttcatgtatgattgcgtccatgaataagatttatcatctatggaaaataactacttatgtgaaatcactgcttaatttagaagttattttagttagccaataagttaaattatagacctaagggttgggtagggagagagaaagaacaccaccattgttaacatttaatctctgtatacaatatataaatttttttaggcaagaaggaaaattagtaagatttccttgctactgtaggacatttctacattcatacatctgaatgactctctgtgatttacactagaatgagacctctcagacctgtggttcaaaagcataagcttggaagagatttcaatttattgattcccgacacgcatccttttgtcagtttcaagaacacatttgctgttattaataccaacctccatctttttaactcaaaatgtcactgtaataagaaaaaaaaataactgatggccctgatacaaacccctagggggtcattgttgcctgggaatgagtttccagttgctgtttacctgtgtatgccttgccttgaaaccaggaatgtacacatgcttcatggacaaagtccctgtcttctagaagccctcaaaactctgaagcccgagccaaatactgtgtactcagaagatgcccaagaagtgttcctggaactgaatccttataaaagggcattgttaaaacatgacattgccccctgcttgacctccagccttctacacaaatagatgtgaaaagatgtgtctgtgtgtcaaagtgtatttttcacatggtgactaatgtttaatataatctatactcagccattacaggaaaataaagatgatatcagcaaccaaccctgagtgatagcctatctgtcctttgtgactaattttcaatactgtttaccaaagaaaaataggttttcaaaagcctattccctttatcaagaatacaagagaattcataagtgctgcatattcacaaaacacatgtttaaagcatagcacttatttggttgcgatataatcagagggtgtttgtgcttagctacactgaactacttgatcatctacagccttatagactccctcaggatcggaggctcttaaacaagctgtttcaactgccaggaacctggccctcctcagttcctacctcccctcccttgaacttctactcattcttcaggcaccagctgagatttcacttctccaagaagtttccccggatgcctaataaactgagctaggtctcatagcacctccgccttacagagtgtaataattatcaccctgtatcgtaactgcctgtttgcttgtaggtctccctgccctagactgtcaactctggagagctggggctgtgtcttggtccccactgtgccccaaatatctggaatggtaggcacctcacagaaacccactgaattgaaatggtgtgaactggggctatcagaaaactggagtaatttaggccaaagaaacctttctatagataacacttttttctgaattataggtatttaggaaatgtatttatgttaggggtgtgtgtgtgtgtgtgtgtgtgtgtgtgtgttgggaagcatagaagctgcaagaaaaggagagtaaagggagagagggtgagaaatggatctcattcctctatgcaaggttgcacttcttcacaagaatttcattctgctgttatactacacacaatcttgtagaattcctgcctccttcattagactataaacccctagaaggtagagattatgttattttttgtctttgctgtttatcgttactcatagtgtcttagcagatcgggaggaagagagtgataggaaaagggggcttggggaaaaaaagctatgtttttacattctcagagtaaaaatttggaaccacatagaaaacagggcaagaattttgtttttatggcactatgagaatttaggccatttttccaatgatttccagaaaatattatatagagtagaaccaaaatcaatattgaataaattaaggtaattaggtaagacaaatgaaataatgtaggtcgttagcatctacaatgcctaaaacacagtacgcattcaacaaatgttaattcccctcccctgttttattatctgtcttataacttaccaccttgccagcattacataagggcttcaagtgtcatgtgaatgttaaattaggactccacaccaggggttttcaaaaatgtggtcatttgggaactttttagaagtgcaaattcttgggctcaccccagacttattgaatcagaaactcggggatggggcacagacatctgtttaaacaaccactccaaatggctctctacagctaaagtttgagaaccactgctctacaccaatgagaaaaacatccattttaaatacaggcaaatgatttgaagggaagactgcaatgtatggaaataaccaccttacctagtgtcttgctgctaaaagtgtgatccctggaccagcatccctggactgtcattgagtcacctgggtgcttatcagaaatgttggatttcaggcccttcccggaactactgcgacagaaactgcattttaacaagattcccagctgatgtgtgtgtatattaaggtatgagaagcactggtctagtgaatattttcagtaatagaagatgagctacaggatggggggaaacaaaacaagtaaaaaatgacatttaaaaaaaaactaaactgaaatcaccaaatttgctctcatatagatgggttatgtacaaagtaatgggtgtttgtctttatcacatgtgatttctctaattaaattttatattgtctaaagtgagtcaaatatatgatgtggggggaagtgggagggcaccacaacattttaactctgctttctaacaagagaataggatgtaagaggaagaacaagtgggccacatttgaaagcccaagacatgtgaaatgaatctattatgtatttgtagctggaacacgtaaacactgccagtgaatttttaaattcttcatcttttgtcccacattcttacatacatgcacatttttcacatatttaacaagtaatacttttatcaccacgatttttgctattgattgcttctttaataacaaaatgcatcacaaacaaaaatgaatgaagctgtctgaggagaaaattccgtagtagctttactgtcaatgcccatcataaataaccatgacatcataggagccttatctacgggttgccgctactgatcgatggcatcactctagtagtgtaaatagcttctaatgtcccatcttccaccttcaaataggctctgattatttatgatagctgttaggttacaagtctgagctgtggtttggatttattttctacttatagctgctgtggatttcaagttagataggattattttttagttaagatgataaactgagatagaactgtcatcgagcctggtacaccatcatctcatctggttggtgtcaccatttgactatgaattcataatgccagaatgcttttgatattatgatcatcaccgcaccaatattaaaagatggcagttaatcactggattttacaacatgaaaaagaaaaacatgcaccagatatagctttctacacaattaaaatgttttaaaaatacatttagccatttgttactaaattgtaaagaggtgtattgtgtgtatttatgataatgaaagtgtgtcagctccaatgtgacagctcaagatgatttaggggataaaaagggaatccatcagcttcttgcaaggtattcttcataatcataaaagagcctgacaggtaagttggacaagaatatatttttgcagagggaaatagatatgagctgtgtctacatgagacaagcaggtggaacattaaaaaatctgtcaattatccagatattttgtcaatataatgacaaatatttgaagcattctgaacattagacagacatggtaagttatcaaaaatgtttatgaactagaccagggtgatagactgtattttatacttgttcaggaattttaagcattatgtaaacaaaggatttttctaatacaatcttaaagtcccacttttaatagattttaccaatttgttatttaaataatctctactaagtcattctttttctttgagaaaaattatgctaaaaaatgtaagatctatgttgcaacaacatggatggaactggaggtcattatgttaagtgaaataagccaggcacagaaagacaaacatcacatgttctcacttatttgtgggatctaaaaatcaaaacaattgaactcatggacttagagagtagaggccggcaagggtagtggggaggttggcgggggaggtggagagggttaataggttcaaaaaaaaaaaaaaaaaaacacagaaggggccgagcgcggtggctcacgtctgtaagcccaacactttgggaggccgaggtgggaggatcatgaggtcaagaaatcgagaccatcctggccaacaaggcgaaactccatctctactaaaaatacaaaaattagctgggcttggtggcgcatgcctgtagtcccagctactcaggaggctgaagcaggagaatcgcttgaacctgggaggcggaggttgcagtgagccagtatcgcaccactgcactccagcctgagtgacagagtgagactccctctcaaaaaaaaaaaaagaacaaatgaataaaacctactgtttgatagcacaacaaggtgtctataatgaacaataacttaattatagattttaaaataaaagagtgtaattggattgtctgtaacttaaaggataaatgcttcagggatggacaccccattctccatgatgtgcttatttcacattgtatgactgtatcaaaacatctcatgtaccccatacatatatacacccactatgcacccacaacaatttaaaataaaatgattttttaataagttctcaaaacacaagaaagttttcaccactcaaaatagcatgttctcaataggtataagtatgttctgtatatacttttcaagataatttttaaattatcttagttataagactatttaaaaatctcagatttcagtacttatgctgtcatatattacatattcagcaattaaccaagtttataatgaaatatgtataatttatacttatggtaaaaattttatttcctaaatttggaataattttgtatgaattttatttatatataaaatatctgttatatttgggatttttgaatggtttttaactacacatgaaataactggaactcagcttaccccttacagtattttacaagcatattaataataatagtatatctaaacttaatcactgcaaagaaaagtgtctatttgaaaatgccctaactctaccaaattataaaattatcactacagcaatctatcttttcatattatttataaaatttttacctgatcttttgcacattgctcttataaagtcattttgagaactactctatatatcaaacatttaaaaaatgaaaagacatgccacttttaatggtgataaagcaactgcttgatgatatgtaaaatgaaaacagaaggtttcctctaataattgttgctcttagatgaatattataattatccaactctcagatatttcactttctaatggtagttatttgaatatttcttcccaatatggtttgcactactaaaagtctcgagtaaacggaaaatctcagtagagagaaagtgggaatgtggccactaggagctgacaatagctgttttgtcacatctaggccctggtacttactcaggaagtggggattcgtccagccagctgatgccaggggaggatgatttattgcctggtgtcctcagtggcaattggaccctttcccactgtcactcacaacttgcaaagattgtgtcctaaagaagaggttcccctccgttctaaagagattacaatgcttgtcataaagtgtcttttaacagagggaaacgggtatgaaaatgggcaaagaaaggaaacaatcagaagaggagagaagatggatgttctgtaaccttttctcagagacccatttcttctactttttctcctgtctttagcaggtttttgttttggctgatgacaatgcgtaatagcctgataagttgattttgtgagtcctttttctcatctcttgagaagacactaactcgttgggacttcagagggctcgcagaggcaggagacaacaattagtttgttgaagatgtcagaaagtagcttcagagttttgccaggagaaatccttactgacagatcagtgctgacaatgttggcagctgcttgaaaagtgcagtgagtggctccagcatcttagggtccaaggaagaaggccactgctgcacattaactctgtactctggctctgtcttcagagtaggaattcctcctgactcgccagaatcaaaaaggaatgttgtatttttttaaaaaagaaaaaaagtctaagaactggagtctacaaaacattttgttaaatagcttcgttaatagctaaacaaatagaaaattgtcagtgttgctgttaatttaaatttaaatcactgcctaaataagtctttataactgttttcaaaaccttttatgtactgtacaattttaaatttacttctccatatgtaaaaatatacactggcgctcaactctacagaacatattaatttcaataaatctttttaagggaccaacctgacatgttaaggagataaaatgcttatggttggaacatacttaaattagtcaaacattttgcagtaccatccttgaaattattaaacattgttgacattcaaaatgccaacaaacttttgctttaaacttaccaaaggagactcaaagtattgcttttctaatacaaaataacttatttttctaacctgaagacataaaattggcgagttcttaaaattgttggaaataatataaaatctcattgcattttgataaatattataaatattagtattttcctttgggataaaaaataaaagattgatctttgtaatgaataaaaggaaaatactacattttggtagcttcgtagccatttactttttaaaggaacataagttggaatactatactgcgtgtgtatggatgtgtgtctatatcatgtaaatgacatatatgtgttttttgtgtaaaattatcactttaggcatagtgtcctggaagttgtaatatagtgaggggttatttatagaaaatctctcagaatgtttcccagatagagctaaatgtaaaccttctctatattttgaaaaaaactacatcaactacagtgtgtttctcacatttctaaaaagagtataaagtgctcaagcgggacaaataagaagagatgtaaatggggtaaccttaaatattctacagagaggagtcccagtgaaagccctgagtgtcaagaagcctgaattctaggctttgttttgccaccaactagcaaatgaccttgagcctctctgggacccacttgcctcatcagtaaaatgaagggttaaacaggatgatctctcaaaggaaccttttatagttatgcaatcattatcatctgaaactactgactaagcatgatccactcagcataatctatgagtttagtcagaatgaggtttctaaaacaaaaaccactgcatagtgaacggccaaggccactgtctgaaatttgaggagcaattatgcagatatgggggcaaccagatctttgatttctggtccataggcttcctgtcaacctttgatcccttcacctgtattaaaggacagccagaggaagaggaagaggtaagagacatcacatagtttgctactgatctgctacatgataaaaattagtggaaatgaagggagaatttgaaactaaactgggactgagaagttcttagagtttatccctgctactactgctgcacattatcacagtattaatacgactgttggggaataaatgcatttaacagttaatgtgaactccacagaaataaattacatggccaaattgttcactaaatgcattaatccagctgtaagggacctgcatcatagcaataattgcactgtcatttcaaagcttttaaaagctaatcaatccaaattatatcaacttgacttataccttcccagcagcagtacctcagtattgcataacaaatatacgataaaagacagcttctggcgtatttgtaaagcagtttaaagcttatgcatttttggctaacctaagacttccagggataggaagaaaaaaaaagacatcatggctccacaggtttgacccaagtttttcccattttactgtctgagccaaacaatacagttaactcactttatgtgcgttcataatatttgccacaaatattgctgcaatagataaaaccagtacttcaatcacaatagtcaatagagttctactgggtagcaaaaactcctcagcacaacaggagacttttaaaattcaagcactctaaaacttagcagcacccctgagagccacaaattgagagagattaattctgtgctcctgcacccctcattaccaggagagctgaagtaggtcaaatgcaagttaatctcctaaattccacttttgtacatgcaagttaggccagccattactgtgtatgggctaatgtctttaagctatgtgcacacaaaattaatagacagtttgcccagccaatatgaaatataaataaaagtaaatgccttgaagtgattttacataacgacatggcacgataaagtaaccaaggaaatatctgcatacacctctgtgctatctagagtcaacactggtgaaaacaatgaaagccaattatcgaaaagttctgaatttttctctgataaacaataacacacagatgaacaaatttcatttaatccacctattttgaaacatctaatagaaaaaaactgcaaatatgatctgcctccacctccccccacttttaaaagaacaaggcaaattgctcatgcagagggtgatgaagttttaagcgaagcaagactgccatcactctgtgaaggtacaatgttttccattctttagggaaggaaaaaaaacaaggcatacatgtcagcacgaagctagtaaaatcaggactctgcttgtccagaaggctcataacaacctaattgccttacctctctcagactgcagccaggtcaaactatttattctgttttcattatgaactgcatattttcaaagtggtaaatcttgtgatttctttgtaaaattaaatgaaccatcatcatacattctgcaggtctctttttaattttgaaaatgttgtttcacattctaacttatttcatatgatcctaacaataacccaaggttgggaggattcaaatgataacgtattattcttaatgtactacagtaagaaatattaaattaccaaattaataaccacgatagctgaattctagtcctgcctcggtagctaactagatatgtgaccatgggtaagtcattttatgtcagcaagccacagggggaaaaaatgcacttcaatgacaatttaaagaataaaaaaaaattacacatgatccttaactacatgaaaagaaatgcttaacctcactcttactataaaaaaaaatttaaaatactccaagacactacttagttacacaccatgctggtgtgtaagagtggggaaatagggacttctatatgctgctctcagcatatagttccatatatagttccatggttggttagcacagccatggaaaattggcagaacctgaaatagttataaatgcatatgcccttttgctccatgtacagttattgatttggcattgtttgcaatagcaaaaaagaaataaaaataaaagcaacccaaatgtttaataatagggaaacctttaaacaaattatggtatatccattcagtggaattctatacaataattgataaagaatgaggaggttctctacatgtggatatggaatgatcagcaagacaaatggttaactggaaaaaagcaaactgcagaatggtatactcagtctatactaatgtaaaaaagagaaacaacatatatgcatttgcttctacatgcatatcatatatttagagagatgatacacaataaaaacattggttgtacttcatgggggggcagttagtggatggagacaggtatgtttagttaattaaataaatatttaaaagaattagctacatagagaaagatatccaaaatattactacaaaaataaatcaaataagtgaatatataggtacacatttgaaagaaaaagatttttgtccgcatacacacaatgtctgtgtgtgtgcatgcattttcctgtaaactttttggaatgatatgcaagatattgttgaaactatagagagacacggagtatttactaggggaaaaaagacttctgcactgcttgaattttactatatgcatgtgtttctttcataatcatactaaccacaaataaaagacaaaaaatgaggaggagttagaattaactgaaagatatctacaagagaagttatctacccttaaatgaattgaaatgacccataacaaaagcattcaattactctcaccttcccttcttctgattcaaatgtagatgagttcactttgaaaaagaaaatttctattagaaattctgtgtggatgacaggcctctgtgaacataagagcaagagctcagggaatggatttgtctggttcgccacataaacgcccaataaatacgtgttgactgactgacaagccccattgctaagcatgctacagaatatgtgcaaaatagcctacttgagcagtctgccatcccatgaagacattcgattccaacaggctagaacttaattggaaaaatatgggcagaacaggatgacaagaccattctaacaaagtcctctgaaaatgggcgattatttctctgcttatctacagggcatcttcccagcaagacactgagccttaaaaaaaaatatttctagcaaccgaaataactctattccatatgcatttgtcaatgttccctgagaaagcagtggtagtgtatgtgagagtggagaaagatgggaatattgcagattctgtctgtgtgtgcacacatgtgcataaggaccagatgaggtgaatgcccttagaaaaattagtatgtttttattcactgaagtaaaaagaggctgtttctgggtgtggagtgtgaaaaacaatcttactactttatagtcacacctcataacataatcctgtaacacctactgacccaggatctccaagaaagggatagtgttaattctattgcacttatgggaaatttggggaatatgtagccaagatccaccagccctgaggtcctgactcatagccttaactatgagatttccctcctgatttgaggatgagtagaatatactcacaccttttcatgggattctacctcgttcttcttcaggaactacaaagcaatcctttaaagatgagtggtattaacactgtaattactattattatttatttcataagagaagtaaacattttatatgtagacttccttgccagacagctaatgtaaaaatgaatatttcaattctgagtcaaagaaaagattaataacttctacacatttattgccatagaccttttatttgcaatcatttcaaaaaacagactgtctttaaaacattttagtcaaataattatgaagaacagaacaaatgccttagaatgactgcatcttcagcagcatgatacattactatttcggtctacctccccctgccctcatgtcatatttgggtacttttatttttcaaatattgagttgttttactgcctgcacagttaaggctatgattggttgttaaccacttctctaaatacttcaggagactgagaaccagagtggaactgcatttttttacatcaatataaagtcatgttcacccccattcccctccctctcatcctcccctttcccccctcccccagtgtttttctccctcacttcttagacgcatttggtaacaatcaggcttttattttaaggagccctaagataaggtatctgtgagctccacacttggagtaattgatcacatttgtttcctgttcgtaggttagacccctccttcttgctctttttcttttttttaaacttggcatgtttctcattaccctctgccttgttagcctagtagaaattttctactgtggagagtgaaaacaggacgatactattacaaacctcgtctagtcggtgacagcagcccctctctttctccaggaacattgggccacttcacgctctagtggggggccctcctatggatacaggtatgcatgcctgtaactgaaggaggttctgtggcatttgcttggtgttcacatgtttaattttcacagaactgtgctgattcataccgagactgttctccaggatgacaacattgttatcatatgactcaaattgccccacctcatttcatttgggaatgttagctcaggttcaataaccatcagctgccaattctgtaaaagaagacctgtatatttcccgtctatgctttctagataaattgtaatcggcagcattttactagccctgtcaggtggggcttaattgcagatattgtctaaggaaagaaaaatgcagaagaatgaacgatcttttcttctttgagtctctgtgggccaatgaatatgagacagggactcagtcattttcctatcaaggcttcaatcacaacaatccaagttaaaaactccagtaactcaatgtaaaatgaaatgcaagccctgccattattttcctgtttggggctgagagagataccaaaataaattgtttataatggctacaattcaattaatatatctacttataatatcaatatttatttataaaaatatgatagagtctaatgaagtgatatgcagtttatgcaagaatcttaacaaataatcctttacctgagtggtattccttcaacattcaaagtttcaagactatctgaacaattccctattttgtttatttggttgttagttggttttgtgcttgttattctcttacacttcacatgtcaacacctttacataagcagccaacaaaagcagcatattttaacagaactaaaaataaattaaaattcaggaagagacttggaacctggtctaagctctacccccaaagtagttgggtgaccttgagcaagtaactgacccttcttgaccttcagtgtcctcatttataaaatgagtaggctgggccagatggctccacagtggctttcagtgcttccttctctgtcataactaacattgagctgaatcacactgtaaaagattgagtcttcgagattttccaaggctatgtagaatacaatagccagtagccacatgcagctactaagtgcttgaaatgtggctagtccaaattatgaggtgttataagtgtgaaatacataccagatttcaaagattttagtacaaaataggtacagtatttcagtcatttagtttttgcatttagaaattacaatattttggatcctctggttagatatattatttaaattataccttttttttactttttataaatgcagctgttacaacattttcaattacttatgtgactcatgttatatctctatcggatggtaaagtaataacaggtctatggctgtgtatttaccacagagagaattaaagtggaaagactctgaaatattttatttactgggggtctttcataataaaacaaaaatctcttgttttctggataaaaatatccaggtcaaagccatctctgaagcacccatgctactcaataaagaacactaaatgttaaaaagtgttgtttcataaaattatagtactagtaacccacatataacctaaagagcttaaaaattgccccaaatctcataattttctcatctaactaatccgatttacattcctgaacaccagaattattcattcattatattctttacaatgtttatattttaaaaatttagaaaaacacattaatgaaaagatttttttatataaattatcttttgtttcttaatatagatgtacccactttattctgacaatccctttgctgaagaacttctgaaggactgtggctaaagatcaaatcttaacatatttttgtcaatgaatacctggataatttaattattaaggaaaaatcaaagttttgtctacataaaaaagtattgcatatctatatgatagatattttagtcaataattgcaattttgtatctaaggtgataaatctacacagtaatgtatttatgtatctttctagtaggtattaatataagagaactattcattatgctaacagtgaagtctaaccctcaaaagaagcattatctattccacattaaagtaaacccagttaatacctaaaatgaatgttttaaagtacatagaaaaatgattcagcaaaaattataattacaaagctgataacggtcatttttcttttgttaataatattcaaatgtatcccttattaaaatatgtaatcttatttttaccacactctttctcaagtgtttgaatctttgaccatccccagaacctgacgccttgtcagcctattgcaggtaaaagcttttgaagatctaccactactcttgtcctaataaggtcactgacctttcaagctcaactcctaccacccccatcttcatttcctctcctatcattagtctgaaatggcatcaactacctctcaattttccttatcccttcaatgccccacctctttagtccaaattcacctaattaggaacttaatttccttttttctctgattgaggaattgataatagatggaccctattcatctttgattcacggaaaactgcaacaatgacctcttatttaggaaggataagcatttattctagaaattgttttgtggaggccaactacagaactaagtaaaagtgatgtttttatttttattttttagctaaaacagggaaaggagaatcattcaaatctgatacgttttgtttcttttacatttcattttacatagccgtagttactaatatttaaaacaagtagattttcctgtaaggcagaaaataattgagttctaatagaagatcactgagttagatttaaagaaatatattaatggaagttaataatttcttaaaaccggtcatttttaacaattttataaaaacaatctctcacaccagaaaagacatatgtgggctaggtatctacaagtgggagtcacatattaaaggagctatctcagtaattagctaactttactatgaaattatcttcttgactctgatgtggtagtttaactgtggagttgtctaacgtaaaaactcaaagcacataaatattccttgcaatattttttttctgaaacttgttggggggaaaagtatggccttaagagttagtggtagcagaaaaaccaaaccaacaattttattccaccactaaaatttttaatgtctaatttcatatcctattcattcagggagtgaaataatcataaacatcatagtaaagcttagaagtgacaatcataataaacagtaaagacaaaccaacttcattttgtccaataggcatttgagcccatactcagagcattctgcaataggactcaggaccaaatcatttcaccaacatttttcttgcaacgaagctattcaacgcagaaaagaattagggaaatagatgacctaagaagagatgacaatttcttgattaaaaatgtccctctcaagtacacaatcttatctctctctgctctctttggtggcccatttgagctgaatgagggttagagctttgctgtctggaccaaaactatgctgatgtgacttagagcctctccccaaaagggaagttacattgttgatttatcccacgaggctacaatttattttcataaaaataaaaatcaccaaaacaagttgctaaaacactgcttttttccttctcattgaataattcatgctacataagcctaagcatggccaaaggatttggctgtttataagagatagctaatgctaaaattgcctccaactcagttatctggaaagaaagaaaatcataggataatgagtcgggaattaagaagaaagcactttaaaacacaaaattaagtgaatcaactacttcatcaattttggaaaataatgttaatactatttttgcttagaaataaaatcatttataccaaaaatcattaattattaataacaattaaaatggagaactcactctaattgagactgaggaatttaaattctgactatcttggagccccacataaaaatgtttccaaatggaggacaataaaaaaagatcggttttatacaagttgccatatttttgccttcatctcctgatgctactccaagttaaccctaaataagtaatgtaaatagctaagtaaaattcagaatcttttccaaaaggcagtagtgttataacatcaaccaaaccagctggtatgtagccaaaacattagagagggaaataattttaaaattaaaataaaatactatcttctaatcatgaagataaccttatttttttcttaggtatcttttaagaacttgcatttccacaagccaattactgtctttatacaaagcttcatatataacaatacaaactgtaaactgacatgttgtgaagctagttgaattcatcacaacataactataaatttcttctcaaatcatttaaatagtatgacatttccccccagttcttttgttgataagcagaatacactttttttcctaatatataggcaagtctcaagtttcttaagtaaatcaaagaatatttattcagtccctccatagctaaccagtagattcgcatagctgaaatcttttattgcttcttttctttctacttcacaaacctgcttatagttattacataacaacgtgagttataaagtcctgaagattttccattgagagtggaattaatctcaatgtaaatcaaagtaaaaaattaaaatattgttagaaaacaataaaaacaagatgttatagcatttttaatcctaacaccaaaaatctcaaaccccagtaaataagttcatattcacagcatatttttgactcacactaacaataatcccagaaagatctgccattcccctaggctacccaagaacatgttaaatctcaaaaacctaatgcctacagtttttctctttattccaaaaaactaatcattatatctcttccaaagttgccagaaattcctcagtccccataaagcttaatttactagttcataatatttccatatttatgtattaagctactttcataggacacaaaatgatatatttttcaaaattggcagtttctatttctctttttaagtttagtttggtcgtattacccataggttaaatcctagcctaacctttaacttgtatcttggaaataccaaaaagcttgtacctttagaaaatgtgtgcaaagtttaaaagaattcgtgttttatggctaatcatagaacgctgaggacaggtaaaatgcaaggaatgttgctagaacctcaggatgccgaaccaagtaaatggatgccatgaaaatacagctgtatatgtttgcatgggcatatgtttgttcagtttttcccccccttcctgagctggggcttcagctttaggtcattctgcaaacaagccccaggagacacacaattacactcccctggagactgaccccttagagtgcccacctgtagccaaacacagatagcatcccggcgcaatgaattagcactctaagctgattagagcagctctgcacaactctattttattgacacaatgaagagaggacagaaaagggcctgaaatgagaaaatcatttccatgctgactgaattaaaagaacaaaagagctccttgcagttgcagcattcaatttgtcgggaaaaaaggaagccacttaatggctcacaatagatctgagcagacagatgaaatttaaaacttcagcatgagtgcgattagcagcgaaacatattctaaatcatttcctccatatgcataattttgtttgattgtttagttctgtgttttacaaaaacactgggctagatgctatcttcaaactgtcttgacttttcattttgcaaaatcacagaacagtttctcattgtatgttaatgtccttggtgacaatataaattgaacacaacaagtgtggctcatgttttcctttcacctttggttttcaaaagtgaatgtataaacagaggttaatttgtggaaactaggattgcaaagtaatcttctaccaaacaacttgtaattcaaaattaaatagattatagacaacagaagcactttgacatggggtaaaaaacaaccaattattgcacccagaggctaaaaataaactgccatgttaaagtcaaatgtcatcactgatgtcttctttggtttaaaagatagcattattatcagtaaaagcaacaccgttaagacggcagtttccaagtatatgttctttttacatttttgctcaattaactattgttttacttgttctgacttataaattcctgagttaaattgaatttgaaattgatgtcaaaaaatgatcacttaataagcaaagctaacttttagatataaataccatatagcagtgaagattctctagaatatcatcttttttttttccaattttataagaaaaatctaaatgtctaaaccgtatatggaaaacagaattgattttcatgaaaggattgaatgtttgtttttgatggggatttttctcctgccaatgttaattttcagtgcctaaaaataaagagtaaaagcaaaggtcttagtttttaattactcaaaattcacagtttcattttccatgcctaagcttcttttaagaaagcttttttgtttaaagtggcccttcagacttttaacctctcatcttgactcctaatttaaatgaagaaaattcactccttctgttcttgaaacattctttgccaagtgttgaggtgcaatgtaaattgagcaaaaattgtagaacaaatcaaaagaaaaacaattactgtgagatactttgagattcaagacttggggtacattactacttaatttgctaagtgtaatttccccagagaaaaaaaaccaaggtattctaaggataataaaagcacaagtgatctcctcaacagcttccattttcttgactaaatgaggtaagagttttttgtataaaaagaaactataaagcttgtggatgttttaacaaaatcaacgtagtgtaactttgctgacagcttgtcacatttcactgactgtctgtctggggtaccgcgataacatctgcattcactcagtatgagagccgaacataagacaaaaaagtgggccctgccacggacggctccatcagtctgtcagttctgacatgtcatctgaattttttgaatcactaaacacttttgagactctggtacttattatcttttcttagtttctatactcgctcagcaatgctggaaaatgtaaaatctgcaagcaaggtagtggacgtcccaggctttttgttgtctaatccgtaggccctcattcatgctcactgttaatctcttaagacattataaaactgttagacaaagaaatgtgaatacctctgcttcttttgagaatgggaggaaaccaaggaaaatcaggatcatgctaagctattcttttcattatgaaaatggtaacttaaacctgttgcatcaaattatctataattccccacgctaaggcaaatgtttttgaagaatgaacaagagtagtgtcacataaagagaaaaatgatcacagaattttcaaaatctgccaaatttgatgtcaacagagcattgagatccttgttgccgcatttctgtttctattttttatgccatggtacatgacatatggttaagaggctttcataaaagctcataaaaaagcttaccaatacccactagtaatcattaaatagtttagataattttgctctttattaggaatcctgggaacactaagagctatataacaatagccttaaaatgtggctaacattcattaaagtgctacacatcacagattttaatgagcaattttatcctcaaaactggaaaaccttacagcatttttcctaaaagggtcaaatataagtagatcctcagagctagagagaatacttacatgaaccacataaaagagccaaagctccatttctacctcctgtttgcagtcagtcattcaggacattaagttaaaactagatgcatttgctttccaagaaatcaagacataaggaagagagaaaataatattaaaattaagaggcaattttttttctggacctcagatacctagttcccttcttcataagcacatgcttaacacctgcaaataatttcaggtatagacaaatgccctgcaaggactaattacaggtgtgcttcccacctgcatcctcaaaaaaagactaattgtgcctcagatggtcaaatcctatgaatatttgctctgaaggaaggtgacacatatattagatagataattaatttaaccaaaaccattaggtaaaaggagttacactgacatttgcctaaggaaaagaaaagataaatgaatgaaaactagagaaaataaagacagaaaaagggaagaaaggaagcaaaaaggaagaggtgaggaaaagaagtctatcatttttcactgctatattctctgggcattttgcaaacacggtagacacaccacacacactttgaagttaatatactaattaattaataatgaacaaaaataagaatgaattttggaaccatgtgttattttatgcactttaccagcgccttatgtaaatccaacttgaaaaacaattttgcatgcaaacaaaacctccctaattataagcatgggtaaatgcactggcactggcaaatccactactgcaaacagaagactttgtgactatttctcacttttcttcttttggcatattgtcgtcttgtaactctctcaagagctttgatgtaatgtcatttgcttgatgtttagtctgtgcctaaaatgtcagctgtttattatttttacatttcagcgctaacacaatggcacttcagaataaagggcagggttctgacacatctcaatgaccaaaggacttatattaaatagaggtttccattcttcctgaaaatactagggcactcattttttaaaacttagatagaccagttttcattactacataattttcttgtgacatttttgtaatctacctgtgagtggccctgtttcaaatactgtatcgagagccagcttattacatcaagaactgtatgccttctttagagccacaaaaaaaaaaaaaatcaccttttccttttatagaacagaagaccaagatggtagaagggttttgagccctaggacaagcagacaaaaagataactgtcccaaaggcagtctctctcctttctaaactgctaagcttaagggcctcctagggaggaagaatttagggcctacacgaaaattaacaggtactatttaatgcatgaaagagtaaatatagacaaagttttccaggagaactgcataaacttataagacttataacaaagttaaaaacgtaagtggctttcaaaaggataacagacaaatccacagcaacagaatcttggtgaggaacagctgatggtagaaatactatctcatttatgctaaatttttaacccttacccatgtgggtaatgaattctaacatcctactgtggcaattagtacttctttttcatctatttttctcaactggaactaactaatcctcgagcctcataccaactctactaaatctattctaccagaatttggtttaaaaacagtcatgttcagctatgtctatagcacatatcacatcataattttgcctttctttacaaaagttttaatattttaagtgtcaccttacctgattatagtaacttcatcctatttcatggaaactgaaggtgaaataacttatttttcttttctcaacacaacttagaggattgcaattggcaatcagtgctctgaggtgcttagttggactatacatagaaaccaaaactcttcaactatactttacaactgtatcttagattctcagtgagattcataacagatctgtggagcagaaactaaagtcaattggagatctatgtttctatcaatcagttatggtaggtgagtaaggaatcaaacttcaaatgaacacttgagtgaagcccaccaagtgacatcatataccacctcagtatagtacctttggtaatgtgcctgaaaaatcagtgttcaggggtccttattggagctctataatttgaatcctaacaactcatgattttcatcaagtgctttctgtatttttaacctggcttatctgtagtcaaactcaactattcttctacctttatattgctgacaatattctatagaatgaatatcttcaaaggagaatctccatgctttggaagatacaagcaaagtgaaaattctcttgttaaaatgatattcacatctggtgttctcaagattgatgccttttccaagattaaaaaaaggctctaacttcttattaaacattccaattaaatgtattactaaatccacactgttctcaatggaagcccctgcatgaagagagaccttaggctatagcagagtttgagtaagtaaagaatcatagcatgtggtagttttgtgacaatttagttcatactgcagatgctagcagacattaacattcagtcttaatggttaggagaattgaaaggagttaactacactccagggaaaccagagcctcctataactggtcttgcccttcaagttcttccttgaggaagaatctacctacactcagggaaactcaactttgggctactgttactttcaaccataaatccttaaccacataattcaagtataccccttctaatatcctgtgagttgggcagtttgccctccatttccagtagcatatattttggaatttctctgtaagaaaaaagctcctttctggcactccctagtgagatgaacccggtacctcagaccctaaaacttaaagtataataaaaaaaaaaaaaaaaaaaaagttacaccaaaaaaaaaaaagaaaaaaaaaaagaaaaaagctcctacaatttttgacatttcttatggttcaaaggcaatgatgaacagcatagctttagatgtgaaaagctgtaatagattttctgtagagtctgaatctatgaatcctcaaatttctgcccagaaagtcccaggactcactggacaaccaggtaccataattaaagaaaaatttaagaataaacaaatgactgtacaaaaagattagatgtattatcacttatctgaaatacttccatacactttatcgcaatatatttagttatgatattattctcagtgactcacagccattctcatttaacaggccattgatggagaagagcccaggggggaaaaaaaagcaaattcacaggatggccagggttgttatttcatatggaataaggtcaacatcttgttaatgggcggagtatgccttcttcatttaagacaaaacactgatgccttgggaagatacttgctgtcatgaggcatatttgttattaggttattctgaaagatgccatgtcagtccatactgaaaaagagaatgaactggaataaaagcatgcggatcttcccctagttctctaaactagatcatacttctccatgctagagaaaaccagctagattacactctggctgaagcctgaggaggcagagtttacaagacacaagagtgctgggggccaaattaaggggtagtaaaaaagtaaaagagataacccttaaaagggagctcttggaagagagttttctttcatggagttagggatgaaggagaacgctttatgaaggtttaaatgtacagctcttacctctctcaaccctgctccaccgcactacaagaacataaattaattagacacgaagccaaaacccctagtcctcctcctgtgcactgtttagggacacttactaaagtcttcagcaaaagaaccatttaaacatgaatcaatgtttcaaatatgttaggtctagtgaaggccacttcccagtggtattcagaaaggggacaatatttaattcaaggtgtggtggctctgccaacctcaagagctctaacctaaaagaatgaattccacaatccttccttcacaaggataaaaagagcacccttgactttggaaggatgatggtgatgatgattattaaaatcagtttgctttgaggtgctcactacagtttaccaagccctgctctaagctcttcacaatactttacaatgaaatattcatatttaatattcacaaaaattctatgaggtagatcctattgttaataccatttaaaagatgaggaaattgaggcaagaagtggttaagtacttgcttaaggtcacaaagctagtcagtggtagagaatttgaacacagtccatgaatctctagaactcctgctcttggtccatgtgttatactgcctcttttgctgttgttgacaaaagtccactacagccatgctacatttgagaggatcaaatgcaatattgaggctgaactaaagtcataccccgagaaagaatgcagttcatacctatatcttttcaaagatggcgaggaatagaattatctctctaaacaatttactttcctcttaaaacaaagctttggtcttaagccaccttctctgctaacatataaaatgcagagagagatgcacctatcaaaggtgctttgatttcagatatataaaacacaactagacactagtttcacacgggagaaatgataaaacaagtatctattttctatgtaatttaaagttaacttgtattcttctcaaaacatgccccaatatattaggttggtgtaaaagtaattgcagttttgccattaaaagtaattattttggaggttttgtttattgttgttggtgggcttttctcaacaacaacaataaattaaaacctccaaaaccatgacaatatagaacatgtccataaagatgaaaagaactaaagagcaggtgtaagagacagaattcgaagactcatagagttacagctacaagagacctgagtgagacttcagagggtaaagtcaaatgacttttccaagttcccaagtctgacttgtgcaaaaattcaaggttcctggcacccagcccagttttcattccagtgtatcacacagcctccctgaaacacaaaccactagacatatggcaaagaagcaagcaagggagctatgccacatgaatggccagattgttgaggaaagaggggtgggggctaggagtaaaggcctgaaggataatatggttttacagaaatctatttgcaagtagatactgcggttaccaatgtggctgcccaagagaaagaacaactgactgacagcaggaacaaaggcatggacagtctcacaaagagagacacaagagtcacagtgcttcgtgtatatcacgaatacacttcatcaagttgagaccaagaataacagtgaggaaaagcccaccatacacaagggcccctttattcttggggctttgctgtttcacacacactttacctgaggaaacattagaccttttgcttccatttctgtgggatccttttgatttttccacatttaactagcacatttcatgactatttagtgttcctatttttttgcaaattaatgttctgtgtacgctgatgacatattcggaagttaatgaaatcagatgaaaatcgcttagattaaaatttccccatttcttcactaccctgtatgccacctactgttcagccacaaaataccgcagctcatgcatcaacaaaacttcatattaatattctctaaggtggaaagactctattagccatttttttccctcctgtcctttgcttccaactgtgtttagctttgaaaccctctgacaaatggccattattctctgggctactaaaaaatttctaaactttaggggaaatgtatttggtccaaagcccaagggaataggcttgttgaattaaatgataaatatatgcatttaaggtcattagagactttatctcctgtgaaggctatatttgtcagattgatataatttctctcaactgagtacttaactccatcggccaacattattacaattattcctttccctttaagtgggagacttctggctaacaacacgtgcgctctttctggtgctgcttcttgagcgatcaaggcacacctttgtttcatttagtatgcaattttcacctctgacccaagaaatgagtcctgggcttcctgaactttattgcctgttaatagactgctggctctcttttcagcagtaatagaaatggtggagaggcatttcatttaagaggctggcagactgcagcctgaaagacaatgtcagaattaaaagtcagcctggccgaaaaactgtataaagaccacagtgacatgaaagaggaagttttccatattccaccccgagactgaacacgcagtatataaataagaacagcatcccggatctcattattttcccaccgcacaatggcagacactctgaatggtgctaagtgattgatctagtaattcatcttcaacttacacctatctacatattttgtttctcctcattaaactggagacatcagtgacaaacttatgaagtggtagtctttggcttcataaaatacacacagatgctcatcagaggctctttcctgcttgcttcttagtgacacatgtttataattttgtctgtattgcgtttgctgtggtttactcttaagtacatctgttcaattaaaatgggaacgtgtgacatggcctgtactcagcaacttttgagcttgttaatgaaatgttctaaggttcctgccttagctctttatttgcaaaagggtttcattccacagagttccaatgattgaaaagtacaaataaaaataccctttaaaacacatagaaagaagtcgactgttttgttaatagttaagaaaggacattattactgcataaggacattattttacatgaaaagacattatcaaaaatgatttactgcctcatgtttggaaacttacaggaaaagtctgataatatattaaacttgtttattacagcttcatataattttaaataatactactttttcctttgacaagtgcaataaactctactggtatagacataggttgattatcacgagtcaactgtgtgcttaaagaaacatgcccaaacaatcagcttttgacggctgcatctcccgttatttacactcaccatcatggtaataactcaccatttctatattaataaggcagtgaaatttattatgatggcattgaaaagttattaagtactgcatcccaagtgacaaagtaccacagcactgtcactatccaaaagcagttgcccattcatcacctgcctttccagatggtcctgcatctttatcgctcccaggttggtgacatcacctgttcacccactcaaaattgatgatgaaagcaaacagatctatcttacttacatttaccaaatcaatttaatttttacaggccatggcttggtgacatattgactgttttccttaatggcatctaccgtatttaatgcaaggatgtcatctttgattcctggcttgcataatgtgtcatttcataataaatgttttctaacatatttacttaatggaaagaattatgattgcttgtcagttctcttattaaacataatgataattctttttcttcttgagtatcatccattgggcaagaaatctatttttatctctccttgtctcttacaggagataatgacttggatataaagtaagctctaggcaagtgttagacataccgctgacccttctcaatcctggggctcagtgtaagggttttatcttatttatttgttactatagaagaactatagtcttaagggatgctctaattaacacatcagcaatagctaaagacggatatgaaatagcattgcaaaaggataacagacgtaaaactgattttaacagttcatatgatgtttaatctttacttccctgggctagtatagtcgcttctcttcagctagtgactctatatcgagtgcatgttaaaatacatatctgtgttgtaaaagttaagatgcaggtacagagactagtctactgactatccgatactcacatgtgacacctcctttccccaagtatgatttatagatcccatctgctgctctttggaacaaatgcttctctgacctgtgtcaccatggcattgtggtacatttctattacctaagggaattagcaattagatttacttttggagatgaaggcaaaatggcatcaagcttctgtatttctatttaatatccatactatatgggtatgttctggggcaatattcctgactcattcctcaccagtgcttatattcagagaggtgtgggagtccagagggaaaatcagtatgtggtctccctgccctctaagcccccacctgtgcaagtaaatgtgtatgcaagtaaaaacaacatcaaataaactccaagtgacactctaaagagaaaaattgggaaagggtctgtgacaaaggaaaactgagtaatctaaggtgtgtgtttctgtttctttaggtatttatctatcaagcatctatttctttagatatcatgacctagccaagagaagccttagtaaggtaatggagagagaggactggaaaaggttaaccggcttcagctctacactgctgacttagactgacagcaattgcgttccttctcttgctctctggttctctcaaacagtgttactgtagctaatctctccccacccttcattaaggctagatgaggtctggaatgaccttcagatttatcttgccctatactgaactggttgggtcccagggttggtgacttcctggggagattccaggaagatggaagaactccacacaggatcactctccatctgtgctcctactgtttagtctcaatcacgtgagcagaaatttatatgtcaacaacagcactctaggatggcttatatccctttggaaaccaggtccaggatttcctacatccctataattgcaataatactacctcaaactaggaaaaaaaaaacttgagttcaaagccaggtaacctgctcctacccgtacagtacattcacataaggagactcatactcatctgaaaaaatgcttcatgttcatctgtgattagtttatcctaattcattagtcagagtctttcccttaggtgaggcttccaggaaaacagggattcaggccagtagtgttgcgagaccaacaagaaatacctttttttgagggcagctggcctctgtgccagggtggagattctatgctggcatcacacacctgctgaattcttaccacaagaatctaaacaacgaaaaaagaaaaaacaaatcatgcacacctgtggctgccaaccagtgaggtttcattgccatgccatgcacacctgggaagcctgtgaggtcagctgcagtgtcagaggaaaacaacactctcagccagttggtaggaggcacaaagcatccatctcccatgggtctgtgacatgaactgactggccaatagccatagaaagtacatacacacacatcttctatgaaaggaaaaccctaagtgtaggcatggcaagaataaaagagatttcagagcagaggctaactgtaatcattatctgctgcgcactgtgcccccaggaagaaggagtcttcttgcatcaactcttaggtcctcctttattagccaaatccagtcgctgggtaacccagagaatagaaaaagactatattgaataagtgtctctgtatgactgaaaaaacagaaatgcagagtgctggattatgaggagagtgagaattttgagaggagagagtctgaaagcagcacctgctggatgtgtgagatactgaaagactaagaaagtgaattgcagaaatatacagggatagtggatttaagttttgcataacattagtcatggaattcccctgtgatgtttctagaaaagatgtgatttggtttttaattttttttttgtgggggtaggcagaagttgatggaccttaaacaattttttttgtagttactgccaaggtgtaactataaggcacccagatttatatgcttacctaaagaaagcatcaggtatcaaatacagtactggtcgattccaaaatgataaatatttaaaagcaagaaggcatgtgtatttgcctgtgtgtgtcgtaggggatggtatacaagattgtgcagtgtgggttctagaaacattgtttctgtatcaggtgacattctatggctgacttcctaggattagattaagaagtatcaacaaattattttctgtatcttcagcagcactctactggtggaataaaagtcgggtctgaaagctggtggaataaatgctcaacagtgtaaaggggctggatctgcaagtagtctattggcagtgggtggcatggccaacaataatacaattaactttcaattgttcttgaagctgattgtctggttcctaggcatgtatattcctctgagaagatacctgtgagatctccttaggtcatgtggacccagctcacactatgctgtggagcacttcagtgagataagctatttctatgaaatgtttgctttaccgtccatcagtgcaagcatcttttttaaacaaaggtactgtcaaatttcttgtgctttatgaacatcttatatcgaatatcaactttaaagacgtagtttttggtgtctatttgcacacgtctctttatattattccttgttctaatgatagttgaccaattcttgccctttgtgattttttagcttgacaattctactaattaacatgcagaaaataatcttaaaaagcacacaatattttaccaatcttcagtttcggttacatcatgaaagaccaaaagaggttctagggcaaaagtgagcatagtatttatctactgaatttgcctatagctgaaataattcattttaaaaatcactaccttggacagaattatgtataaagagaagcattttatcaaaatgattgtatgattctatcaatgtaaataaactttgagatgttaagatactacattaataaaaatttttatttatcattcaaatggaagagtgtacagttcccctcctactccccattttttcatgctacctacttatcattattggaacaaattctcttcatgttgctaccttcatttgatgaaacaactagggagcaaagaagctgaaccaactcctatccttctaagatagatttgaattggttatttcctattacttctcactgcttcttaatttatcctcaaggaaaaagcatagagaatagaatattctgatgcagtggtctcaattaagtattctagaatattaagcatcataaagaatctctgtccctataattgccaaatcctagacaactgtcaaaactattaaaagaggctctttcctgaatattttattgtgagttttactattgacttagtggccaaagagggaagcaataatcatgcaagtatgggggttaataataagaaagaaactcatgagggtttgttttgggataaacaatttatatgaggtttcctaaccggaagacaaatcacccaacattcctttgaaaaacgattgattcacattcaaattctggttgatcaccaaggcagacagagcaaaacagaagactcctcatacttgaggaaattttcttaaatttggacatcagacttttccacttcaccaacttcactttggaagtactagaggttgcccaaacagcagtaagagtaatagacatgctggacttcattgacatctttcatagaagaaagaataaggcaagcaagcctcatggtatggacagagcatatgtgaatgtaggaaaggggacagctgacctttccataagaaagaaggtccctcttgagcccaggccaaaaccagagacagtccatggtgcttctggagggtaaatgtctataaacttgattgcagccttttttttttttttttttttttgagacagggtcttgctttgttgcccaggctggaatgcattaggatgaatacggctcactgcatccttgacctcctgggttcaagcaatcttcctgcctcagtctcccaagtagctgggactacacatatgtgtcaccatgccagcctaatttttaatttattttttgtaaaaatggggtctcactatgttgcccaggctggtctcaaactcctgggctcaaatgattctcccacctcagccacccaaagtgctggaattacaggcatgaaccacctcacccagccttctttttttatttcattatattctaagagaatctgtaatatttccttgggcactaatgacgttcaaactcagggtcccattaactaatcttcacttctcttggcattttctctgtttttaatttctcacaagataaaattgaatatccaaactatatttactattttaaaaacaatattgcaaagcttaataaatactttgtaatgtaggcttttatagtaatacacatttgttattatattacatttctctttcttaactacacatcaaagacaatcttttggatagctggtagtcttcctcctcattttaaaaccattaagacttcacttcttagttatctagtgttaagagtatgcaacacgtcaagtgcacttgctttctcataaataaattaaactttttccctgaaataaatgccaaaccagtcaaaattcattttgtgcccaagccaacctaaagggtcctaggggagaaatactgttattcaaagacatctagtgcaactggcataaaaacatacacatagactgatggaaccgaatagaaagccgagaaacaaagccacacatatacagccaactgatcttcaagaagggtgccaacaacacacaatggagaaagggtagtctcttcaataaatggtgctgagaaaactgaatatctaacgccaaaaaataaaatttgacccttacttatcgcacaccatacaaaaaactcaactcaaaatggattaaagacttaaacctacaacctgaaatcataaaacttacagagaaaagtataggagaaagactccatgacattggtcttggcaataattttttttaatatgaccccaaaagcataggcaataaaagcaaaaataaacatgtgggactatatctaactaaaaatttctgcaaagcaaaggaaacaatcaacaaaaacaaagaaaacctatggaatgggagaaaatatttgcaaaccatatatctggtaaggggccaatatccaaaaatatataaggaactcatgcaactcaatagcaaaaaacattaataataaaataactcaatttaaatatgggaaaaaggacctgaatagatgttttttcaaagaagacatacaatagcgatcaagtatatgaaatgatactgaatatcactagtcatcatggaaacgcaaatcaaaaaaccacaatgagatatcacctctcagctgttagaatgactgttattggcgaagatgtggagaaaaggggctctttatatactgttggtaggaatttaaactggaatagccattagggaatacagtataaacagtcctcaaaaaattgaaaatacaactcctttatgatccagcaatcacacttctgtgtatatttccaaagtaaataaaatcgccatctcaatgagatgtctgcactcacatagtcattgactgcaacattatcaacagtagccaaaatatagaaacaacctgaatgcgaaggatgaatcattttaaaatgtggtacatacacaatggaatactatttagctttttaaaaagaagaaaaccctgccatttgggacaatgtggacaaacctggaggatattatgctaagtgaaataagccaaacacaaaaagacaaatactgcatgatttcacttatatgtggaatctaaagtaaaaaatgataggaacagagagtagaatggttgttcccaagaactaggaggtaggggaaatggggagatgttggttaaagggtacaaactggcacttgtaagatgaataaattctggagacctaatatacagcattgtgtctatagttaataataatgtattgtatacatgaaatttgctaagggagtagatcttaagtattttcactacacacacacacacacacactcacacacacataactacatgaggtgatgggtatcttaattagcttgattgtggtaatcattttacaatgtatatgtatatcaaaacatcacgttgtacaccttgaatgtatacaattattatttgccaattatacctcaataaagccaaaaaataaaaaataaaacaaacacaaaaaatctgttgcatatgtctaaaatctcaaattatttcattcttcttcattatcaagcacacattatttgtcagcctcctgatgctgaccaccgttgttaggtatcttagaagtgcaatgttgctgttgttgccattttaatgaatattcctgtcttagttaacatagattgcctgtttcaatatgtaaggtgtcactgtagaatctaaaatcaaacttaaaagtgtgagaactatttatttttaaaatgacacaaggaagcacatcttcattgtaatatcacattttaggattacattgttggaacataatgtattgcccaagcattgattcaaaattagttaatgaatttctgactccagtgtaatctgtttccactattcctttccacctatttaacacagcataagagatattcactctctactcatgtcattatgttctatgtgtaaatgtatgtatgttcgaaagaagaaaactaagttcacagccaatattttaactgattaaactaatttggagcaattctggctgagatgaacacaaagccgggtctggcacatgacaggtgcatcaacaactgacttatacttgcagagttttgtaatggccaatgataataaagatcagcaaagaaaatgtgccacaaggcaatattttaaagaagcaaactttttacttttttcaatggcttatctcagagtattacaaactaagccacctaaatttttctttcacgtaaacaagaagtttgtgatctctcctgaaccctcgttttcattgttagttagaaaacggtcagtgcttccatttcaaaccaacccagagtcaaataattagaccatccagagataactgaacttctaggaaacaagaaattggaaaaagagcaataacttataaaaatcaatcgataaaatataataattggcttttgccctaataaccctatgctagatctgcattttagccaagctgcttctgctgttgtcttgttaacatttattgggttcttctgccagctctgtgctaagctcctgacacacaatgtcacattttacccttacaacaactctaattggttagatacaattattattcctacgtgacatgtaaataaactgaggggcagataattaaagtttcccaaatcactcaagcccacaggacccctgaggaggacttgagaccaggaagtctcactccagaagaagcctgtttcccactgctccgcatgcagttacaatgttactacattgtgggcacttttagaaggaaacatgagaaaaacctcatcctgaaccaacagaactctaaaaagttatttctactcagtaattttaatcaatccgtaactctaaagttcataacctgagaaaaagctttctatcactaattattttcaagtcctttagacaagcacattccaagtctttaaagatctttttgttggagagaagtcacatgcattgtgaggtggcaattgctgccaaactctaatattatttttaaagtttctcttggttggataaatactggtttgagagaaaatcatacaaatgatgtttctggtatctatagcttatttttaccagaccatatattttggtctataaattatattttcaaaagtatcttatttctctaacatataaacaaaggattttccaaagtaccttacttgggaaatatattcaattttttattcttaaataaagttcagaaagatggcccctatttataatgttatctttgacctttctcttttaaaaattttctttgaagagactaccacatttctctactcaattctgattatataacggctaatgacgtggggcagttttttcttaagtttttatttttaatttttgtagatacatagtaggcaaatatattcatgagatattttgatagaagcatgcaatgcataataatcacatcatggaaaatggggtatcatgaggcagttattattgacccattgaccaaataaaaagcagggaccattcaattggagtagtttccctagaatcacacagttagtgacagaagcaagactggattatacatgtctgaattccaggttctagatttgtccatggactacttcagctctcattccttgcctcctctttcagagtcacataatcctatattcatccatccattctttcatttatccattcattcactcatttatttattgaacaattatttgttgaatgtctgtgttatagactgaatgtgtgtgtcctcctaaaatccatatgttgaagccctaacccccattagggctatttttggaaatagggccattaggatgtaattaaggttaaataagttcacaagagagggtcaccaatccaataggattagtgtccttatattaataaggagagagagcagagagcttgttctctctctctccctctctctctctctctccacctgccccaaccctctctctgcttatgcacaccaaagaaaggctatatgaggatgagatgagaagacagctgtctgcaagcatggaggagagcgctcaccagaaaccaaagcagctggaattttgatcttgaacttctagcctccagaattgtgtgaatataaatttctattgtttaagccacccagtttatggtattctgttacagtagcccaagctgactaatacagtctgcttatttcatttaatggcactattttcagaatagtgccacagggattaaaaaaatatatggaacacaatcaaaacattgcactaggagaatacacctttgcaagctctcaagaactcttgctttgttagggaagctatgtaaataatctggatactacacaatgttttagtgttttcagcccaagaagttcaccccagaagcctgctttctactgctctgcgtgcaattctcacgttgtctcataatggctatctttagaagaaaacataagataaccctcatctttaataagtggatccacctttcttggtgggacaaaatttaggtagtaatatattgtaattagaaagaacataaggctgggcatggtggctcatacttttaatcccagcactttggggagccaaggtaagaggatcacttgaggaaaggagtttgagaccagcctgggcaacataatgagaccccatctctacaaaagatgttttttttaattagcgagtcatggtggtacacatctgtagtcctagctacttggaagactgaggctggaaaatggctttagctcagcagtgagctttgatcataccaccaaactactccagcctgggtgacatagacaaagggagaccctgtctctaaagaaaagaagaggaagaaagaaaggtcatagatgatattatggaagaagcaaacttgaggaatgaatagaaacttgctaaggatggggaggaaaacagtttcccaggtagaaagaacagtgtgtatacagctaaagcagtgtttagagggaaatttgtaacactaaatgcccgcagaagaaagtgggaaagatctaaaatcaacaccttaacatcacaattaaaagaactagagaagcaagagcaaacaaattcaaaagctagcagaagacaagaaataatctaagatcagagcacaactgaagaagatagaaatatgaaaaatccttcaaaaaaaaatcaatgaatccaggagctgttttttaaaaaaaaaattgacaaaatagatagaccactagccagactaaccaagaagagaagagagaagaatcaagtagacacaataaaaaatgataaagggcatatcaccactaatcccacagaaatacaaactaccatcagagatactataaacacctccatgcaaataaactagaaaatctacaagaaatggataaattcctggacaaatacaccctccaaaggctaaaccaggaagaagtcaaatccctgaatacaccaataacaagttctgaaattgaggcagtaattaatagtctaccaaccaaaaaaagcccaggaccagacagattcacaggtgaattctaccagaggtacaaagaggagctcgtaccattacttacaaaattattccaaacaatggaaaaagtggaactcctccctaactcattttatgaggccagcatcatcctgataccaaaacctggcagagacacaacaaaaaaagaaaatttcaggccaatatccctgatgaatgttgatgcgaaaatcctcaataaaataccggcaaattgaatccagcagcacatcagaaagcttatccactacgatcaagtcggcttcatccctgggatgcaaggctggatcaacatacacaaatcaataaacataatccatcacataaacagaaccatgaaaaaaaacacaggattatctcaatagatgcaaaaaaggccttggataaaattcaacagcccttcacgctaaaaactctcaataaactaggtattgatggaacgtatctcaaaataataagagctatttatgatacacccacagccaatatcatactgaatgggcaaaagctggaagcattccctttgaaaactggcacaagacaaggatgccctctctcaccactcctattcaacatagtattagaagttctagccagggcaatcaggcaagagaaagaaataaagagtattcaaataagaagagaggaagttgaatggtctctgtttgcagataacatgattgtatatttagaaaattccatcgtctaagcccaaaaactccttaaggtgaaaagcaacttcagcaaagtctcaggatacaacatcaatgtgcaaaaatcacaagcattcctatacaccaataatagacaaacagagagccaaatcatgagtggactcccatttacaattgctacaaagagaataaaatacctagaaatactacttaaaagggaagtgaaggacctcttcaaggagaactacaaaccactgctcaagaaaataagagaggacacaaaaaatggaaaaaaattccatgctaatggataggaagaatcaatatcatgaaattggccatactgctcaaagtaatttatagattcaatgttatcccatccagctaccattgactttcttcacagaattagaaaaaactactttaaatttcatgtggaaccaaaaagagcccatatagccaagacaatgctaagcaaaaagaacaaagctggaggtgtcacgctgcctgacttcaaactatactataaggctacagtaaccaaaacagcatggtactggtgccaaaacggataaagtagaccaatagaacagaacagacacctcagaaataacaccacacatctacaaccatctgatctttgacaaacctgataaaaacaagaaatggggaaaggattccctatttaataaacggtgttgggaaaactggcaagccatatgcagaaaactgaaactggacctcttccttataccctatacaaaaattaactcaagatggattaagatttacatgtaagacctaaaaccataaaaactctagaagaaaacctaggcaataccatccaggacataggcatgggcaaagacttcatgactaaagcaccaaaagcaatggcaacaaaagccaaaattgacaaatgggatctaattaaagagcttctgcacagcaaaagaaactatcattagagtgaacagtcaacctacagaatgggagaatatttttgcaatctatccatctgacaaagggtaatgtcccaaatctagacggaacttaaacaaatttacaaataaaaaacaaacaaccccatcaaaaagtgggcaaaggatatgaatagacacttttcaaaagaagacatttatgtggccaacaaacatatgcaaaaaagctcataatcactggtcattagagaaatgcaaatcgaaaccacaatgagataccatctcacaccagttagagtggcgatcattaaaaagtcaggaaacaacagatgctggagaggatgtggacaaataggaatgattttacactgttggtgggagtataaattagttcgaccattgtggaagacggtgtggcgattcctcaagtatctagaaccagaaataccatttcacccagcaatcccattactgagtatatacccaaaggattataaatcattctgctataaagacacatgcacatgtatgtttattgcagcactattcacaatagcaaacacttggaaccaacccaaatgcccatcaatgatagactggataaagaaaatgtggtacatatacaccatggaacactatgcagccataaaaaagaatgagttcatgtcctttgcagggacatggatgaagctgaaaaccatcattctcagcaagccaacacagaaacagaaaaacaaacagcgcatgttctcattcataagtgggagttgaacaatgagaacacatggacagagagaggggagcatcacacaccagagcctgtcagggggtggggggctaggggagggataacattatgagaaatacctaatgtagatgacgggttgatgggtgcagcaaaccaccatggcacgtgtatatctatgtaacaaacctgcatgttctgcacatgtatcctagaacttaaagtataagaccaaaaaagaaagaaaaaggaaggaaagaaggaaggaagaaggaaggaagcaaggaaggaagacaagaaagaaagaaagaaagaaagaaagaaagaaagaaagaaagaaagaaagaaagaaagaaagaaggaaagcaagcaagcaagcaagcaagaaagagagagagaaagaaagaaagaaagaaagaaagaaaagaaagaaagaaagaaagaaagaaagaaagaaagaaagaaagaaagaaagaaagaaagaaagaaagaaagtaagtaagtaagtttggggacttaatacaatatggaaaccatcaattagacatggttgatatgggagagaaatgtgtcaaaatgacacatttttttggactgaacaactagatagatggcaatggaatttattaaaacaggaaatgtataagaaggggagctttgcaggaagaaaagagcaagggccctactagagacagcaatgatttgttcagttatgataggctgagtttccattaggggaacatttaatgcagaatctgatgcatagtagtccctcaataattgtttgctgaacatggattttctctgtatttatttgggaggaggcctaagaggtttttttttctccttcatcatttttttcaaaaatgaaggcatatcaaaaagagaggtcacactagttaatcacaattatctctaactaaataggaggaaaaccagctagagttgagaaaaagatgacatggggacaaataaaagtcatccggcaggggttgggtgagatgcctttgagaaagtgcccttgctaatcatgattgggttttgtattaactaggtaagattaaaagagaaaaaaaaaaaaccctaagaagaatcaagagctcaactgctcctctgtggaaaacaagtttgccaaaattacaaaaagtcatttctttggtttttttataatacctaaagagcagacaagccacattctcaaaaggaagggtaatcgttaaaatgatgggaaaagctactgaattggccatcaactgaattcttgaaggagaaagaggagaaagggaatatgtgattttcggccaaaaagtcaggaactattttataaaggtgtcttgaattccaagcaataaaaacaactcagttttgacataatgaaaaaaatcattttacatttctcaaggtaaatatttgccagtgtatatgtggaagacatttcactccaaggagaaaaaaataattatttttgaatttcctccaaatgcagaattttccccaggttcatccaccaatccataggtattatgtttaaaacggcacagtcctgcatttaccaagcctgtaattgaaaagtgatttcattattaagctgtggtttattccaagccttctggataatcttgatgagtattgcacttgttgcttaactgtggagattttgtaataaaagtttaatgagttacttattattagaatgtttatagccattattttaaggtgaacaataatgacgtaaagttcgtacgcatttggtttaaaacgtattcaactcacatatcagttaatgctacagtgatttttaaaaactctcttatcagtacacgtgtctaaaggcaatgcagctaaacctcagctttactggggctatggttaagaatgaaactaaggaaggatttcccacttgaatcatgtcaaagccggattctggcatttcagaatttgaacaagaattgcttttattatggcattttgaacagatttcacaagaggatacatataaagcaagaggacaaaaagttgaaattaagtcctgaaggcactgaatattcatttctatttaaaagctaaccagatattctattaatgatcataaatattaaggaaacataccgaaataaatccagtttatctgatttctgtctactgaaatgctatgaaaccaaaggtcaatcacatctctaaaaaatatcttacccctgcagaaactgtctacaagtttttcagatagaaacaagattttccagaaattatgatgtaatgattcaagcacaaaagttttcaagttacagaaataaatggaaagtatatatatctactgaatctgtataaaacttacactcagaagaataacatagttacctgtctttattgaaataaatttaatttagattctttaatcagactataacttctaattcttagatgttgccaaatggattttatgaaaaatatgactgaaacgagtgactaattttcacaaccattttgtgcgtctgttttgatgcacaaattactcattaaatcatttgaatataaagaaccataacctaattcagtgatgagtacagtgctgacattctggaagcatgtataattaaagcagggttatcaaaagagaggcaaaatatattagaaaaacatagcacaaaatgaaaataaaaccaaattaactcatagtcacaaaatagagaaaacaaatgttttcctccaatcctccaactccccaccccaaaaaagataaaatgcaataaacatgtcatatgattatgcttgtttgctaatgccacatgctacacatggtcatagccaatgtttccaaacgttaactataaaatcatatcttcttcctttagtattttttcaaatcagtacaattctttaaccatatattaggttgggttccctcctatcacgctatacctttaatcaatacattgtttgtattaagaagtgagattgtaaaggaagtttattcttaaaaacctgttgaaaacatattgtaacaaatataatttgcttattttgtggatgcttaaacaatctcttctttacacagctgcaatatataaatgtgttaactcaaaatacattcttacctcccatccataactggggtctttcaggtttgacctctgctctcccacataaggcccaaacttttcacctacttcgatcttccttttggtccatattcctagtcctgccccaggcatatttgactctcgaagttcaaactcagcaggaatggggatatcatcagggatgtagatgggggctttgtaaggagaaccctcctttggagtgaatgcttcactggatgtggcaggagagcatggctcttgaatattgagggagggagtgctggctactccatctgcatctggcatttcttccaaaggtatttcagggtagttgccatatacacactcattatctgtgaataaataagaacttcatgaattccttctgatattgaagagacaaaattccacaggggtagccaccttattatgttgttctttgaaggataaacaggaaagaccattgttacgatgtgccttcattaaaatctttattatttacaggccagggagaggctagagattatggcctctgtggtttatctgtggtgaatccataaatcaaatgagctaatcctcaattgtcaatacttgcatgggctagttcaattcattatccatctgggaaacaatcagcaacttcattattggtctgactaaagtacagacaagaagttaaacatgtgtgtaactacaacccccaaacaattccaaattgggagctgacaggattctaaaatatattagaaagttttgtcatgcaatgttatcttggaataaacataggagagtcatcaaagattccaaaggctgccatgtgccacaaggcttaaatgtgtgtggcaggattatttattggaatattagtgttttttctttctctatatttcctttccaattttgaacatgtcaccaagcccttggtatttccttgcctcagtaacttatgcagagaagaaagttaaagttacctgaagccagtgatgcctctgggtattcgtaaacgctaaaatcgttaaagaaattgggtaaattttccagcggggaaagggagaggaagggtcccttgagatgcaccaaaaagacagagaatttcctccagacagagaaatgagggagatcagaaacgctttgtatggggcactgctcatctttacggagcagcacctggggaggtggcaagacctttgaacagacagcagggttggatagctaggagttacgacactgagcacggaggacctgaggacccccaaggcagcacggcgccacacttgaagtaaacgagtggaccgtgggagaccttaagacctctatgaaacttgtatggggattttatgaaaccaatcaaaggggatttcagttgtcttagagcaaatgaatacatttcttgtctgctaggatcacaaattgaaagtcatacctgatttgtttgattcatagaacttcaaggaaggaactaagaaaaacagatgaaaattacgaagaaacagacttcgatcgagctagtcaaaggttaattatttgaaaaattagctgagtgtggtggtatgcgcctgtagtcccagccacttgagaggctgaggtgggaggattgcttgaacttgagaaggctacaatgagctatgattgtgtcactgctgcacaccagcctggcaagagactgaaagcccatctcaaaaaaaaaaaaaaataaaaaaaataaaaaaagaaggtaaaatgggttgcctccagctccatgatcagtgttctactatagcctggataaccacgagttaaggatgatgcatcatccctaactcgtgcatcaagttgctgattaaactaggtgactttaagaccctaccaaccccgcagttctatcaattaaagtcttctaagagagtttattgggctagaagatagaagaccttcattattcagatttattattgtaacagactataacactcatcatcaattgcccatcaagtaatgactcctgtctcttaaagttttgtgaagtgtaaagtgatagcacatgcaaaagtattgtttaatgaggtgcttggttcttggttcaaacactgagataatgccatttaaaccaagcatataactgaattccagaacccaaccttatacctatgggacataggttctcaacatacaagctcattatcattcaagttcagcatgtccaaaatattgtaccttatcatctgccctcaaattgattctcttgttcactttcctctttctactatgaataccatctctcccttaattatccatgtctgaggctttaaaataacatagccattttctctcctttgtcttccaaactgttcagtcactaaatgctatttgttcttcttgcaagattctaaccttcatccaattctttcaaatccacattttcacacctaaatattttcatagtcctttaaatgggtctcaacctccagcttctttccactatccatcaacactgagcctgtttaacactgctgagtttaccttcctggcagaccaattttcctgtttgacagccttcaataatctccagtgtctgcaggtaaagtataaacctcttaggtttggactaaaatctctgtggttttgaaaccattcttcctttccatctgattctcaatgctcctcaaagggaacccccaagttagagtaaacttactactctcctctgagctcagtgagtatttcttcttcagttcttcctgcctggcactcctctctctgcacctctgcccgacaaacttctagtcttcctcctgagtcaaattccagctggtcctatcaccgtcccatttaacactagtattctcttccttgaattattacacaattttatccctcagtttggcaatcatataccatgcattgctgcttatggtttaatgtgtatgattgtttcattcccaagtaggaaataggtccctgatgggagacgctaggactcttactttttcagaattgtccaagtgatctgcatataggtgtttaacaaacacttgttaaatatataattaatctaacatataattttattaaactatgaatccaaatcaatacttttttttaccaaatataggaaacttttgatcctacaaagcacctttaaacctgtagaaatagaacatgatgaattgtccacttttctccaaacccaacatcaaaggaaacaattttaataattctccaaagaaatattatcagagaagtatactttaaggtccaaacatactcaacaaaatccatctaattttatcgttcagggagattttgcaattcaacctaacatttaaaagctcattaatggtcttagcacaggtaaaaacctataaaaacatctctttagaactgtaacattcaactactgcaaatgcaaagttattttacacattcttaaagcgatttctcccccattgttagaattctgtttttcttgagaaatataaattgtaaaacattgtgtactctataaatgtgtccatgtaagcgggaggaaaccaaaaggcaccaaaataaatagaacaatattcctcccgtaattatctattaaagatcagtaaaatttcccctacttcctcaaagtgtcaaatcagtcatactttcagtttcatgaaagtgatctttaaaaaaggatagaggccgggtgtggtggctccagcctgtaaccctagcactttgggaggctgaggcaggtggattgcctgagctcaagcgttcgagaccagcctgggcaacatgacgaaaccccatctctactaaaaatacaaaaaattagccgggcatagtggtgcatgcctgtagtcccagccattctggaggctgaggcacaagaattgcttgagcccgggagacagaggttgcagtgagccgagatcacactattgcactccagcctgggcaacagagtaagaccctgtctcaaaaaaaaaaaaaaaaaaaagcatagagacaagcccatctgtgccctcccactggcatagcttatcccatgacctctgaattacccacaaactctcccaatgcataatctaagcgagtgcatttagatttcagttcctgtggagacaaaatacatgtgtgtgcccaggcagctgcacagaagaatttgaatttaaagcctgaatgcaattctgcttacaatgacaaaaatgtacaattaaacctaaagaacaacttacataggtcaagcaaatccacaagaagaactcacggacctattcatccatatgcaagcactaaatatatatgcaagtgcaggcaatttgttttgaagccacttttaatctagtatcatccaaattaaatgtaaaaaaggctgtgatgacaaaagcgaaaatattaaactgctgagttttacgtatcaaaacatgcaacaatatttcaatgtaatctagcattatgaaattttcaacagcaaatgcagtttatcacaccacattgaatatttgcataaaccaaaataaaataatgcctccatatacattactcaaaaactatccaaaaagctgctaaaacatttcatctaaatgataaattacttcaattatcatatccccattaaatctctgttattggggaaaattggtagatcctttccctcagctataactatagttaattaaagcatttctcagatatcacactgacagattgggcacgtttacaataggtaagtatcaggtaagaagtgccatatatatcagtggtcccataaagataaataacacttgtaacttcttggagctgagctgtctgctactgtaatttgcttcatgcatcctttaggcatgtcattaactgagtgaggaaagaaagacaagcatattgttggatttgagacaaatgatttgggaaattgctcttggaagtcaacctcttcaattcaaattttaagtgttctaatttcctcagagaccaagggaaaggccacattttgattagattatatttatttatatgtgtctttgaataactaccataggtttccacttcagaagtattccattttggaaacatatcagaaccttcaaagagaagaaattgcagaaataataccaataatagtaacttccatagatgtatccacattttctcattttaatgctcaaaacaatccattgagaaaatgatgataagaataatcttccattttccagatgtaggacctgatattcaatatatccaaagtcagctgagactagctgggtgtccaaacccagtcctccctttaactcttaggcaacttgtttttcgatccttaaagatatgttttaaagtttgtttgttttatcaaaatcgtagccataatgtgtgaatactttggcttttgactttttcattggattatagtttattataaacccttccttatgtgtattttactattttctaaaactacatttaattgctttataatattccattataggaatccacaacagctgaactacttccatggattttatttatgttgcttctaattttctgatatcataaatatcatgaaaatgagccttccttaacataaatttttattgtcatccatttcaatttccttaggttagattcctataagaaaacttagtgggtattgacagattgcttttcagaaagtgtatagcaatttacacttctaccaattatactggcatttattattatgtcttgtttttaataaagaaaattatatatctattactgcttaattcacatctcagttgattacagaaactaaatattcttatttgtcattcaaacttctttatttgcaaattgttcattgtttttgcccacttttaattaggctttcatgtctgtcttattaatgataaataaattagcccttggatattgtattttaaaatttcctagtagacaatttgccatttggtatttcgattttttttaacttttatggaactaagtctatatgtcttttgtgatttttacatttttcttacaaagtccttacctacagaagggaaaaaaagattcccttgaattttctttgagtttcatagttgcttttctaccaaccttggattaccaatgagtgatttactgctgagtgaaaagcagaaaaaaaaatgatttcatttatttgagcgcctgtgaacggcaggctagaaaaaaatgccatttcactcgtaattcttcggttcttatttgcaaggctggcctaaatgccttctctttttgtgggttttatataactcaccatttgtttcttttggcctttccgcctagtttaactgcaaatctggtcagatgccattcaaaatcctgagtttcaccattaatgcccatcataatacttatcactcagcattatcattagtgatagtaacatgaataatttttctctctactcttcacattagttcattgatagaaaatattcagcaactaaaaagtttaatattaagagcatatatacatactttgactataaagtaagactgatttctgtagttattaagaagttaattatttatactcaactgtacacatatatgcatataatacacacatccatgtgtatttgcaatctgtgtgtaggggtgtgtgtgtgtaatagctccctaatcttaaaaataggctgagacagaaacatgatttgagatcccaggcagactggttgagatcataactacatgaaacaactgccaagaggagctcaactagggaattgaacagattaggtaactcagaaatttagacatttccccccattatgttcctcattgcagttttgtaataaaaacatgagcaaacttcaaaggaagctctgtagtaaaggttaattgctactaaagaagagggtgggcccaagcgccagtactttgtgcccaacttgcaagcagacaggaaggattacacgtggctgagagcggaggatgtgtgccctgctctaggaggagaacagctcggccaaacctcaaagccccactagggacctcctggtaggacgtgagcacatgagcacaagtccatgagctgatgcctgctaacagtgcggcagggaagggagggggaagacatcaatttccttacaaaattaaaactggacatgctcttcttcccttgttaggacaattccagagcagttacagaggcttgtttgtgagaaagcagaggacttcgggagccagctcttctgcaccagtaacacagtgaataaacacgtgctgggcttggggaaaagggtggagctcaactaatgccagatgcacaaacagaacaaagaaggaggctatgaactggccagcaaaatcttctatgagaatggccccaagataatgaaatttaagatcccaaagaaacgaagaaaggaaactagtaaaagtagggaaaatgaatttccagaaaactgacttaaacaagctgtgaaggactgtagcaagggtgcagaattacaggcttagaaaacagagacattgaatagaatgggaactgctgatgggcatagtctttagcatgtcctgctccagaggggagtgagaagaaaagagacttaaatggagtgtttggacactggactgaatctgtagaacccgtgtctctagatacgaccattatgtttggaaataatctatcaacatggcttggcactagaatttttttaatgaccctctaagcttccttgcacttttagtatttgctacttcatagtaccatgctattccatgtcttccttatggaacttttccccagtgtttcctaaaaatatttcatatacgagttgtcaaaaagactcagaatggaagtattgggggcaagatagcaagggagatggcaaagaatgtgatacggatggaaaataagggactaaatcaatgagcaaacttttatttttctcctggtattgcggcatactgttgcatgtcctgtggcttttaaatctggttaagagattttccactcctctaggaatttcacagacatttcactaaataaatatgatttgggaattaaactagtactcctaagctattaaaaaatgggcttcgcctcttccaaaactttctcttcagagatggaactaagcttttgtcaaaaggtaatggaaagaaattgctagaaaattcatacttgaggtaccagtaaagccatttggtatctagttactgaatctaaaagagctaacgcaaagacattaaagttctgtgagtactattccaaaggaaaacatgagctggttaatgtttggcttattctgttgttaaggagccaccgtcaccaatatccactggaatgaccaggtaagaacagacttatcacatatcagatagatagtttttcttttatgttttagctatgtgcctctactttcttttgccagtacaaatttttgagagacttttagcaacctctgatggacctgatgggctttttcttcataagctttctatgtccccaaagtgattttccttcagattcatttagaggaaagtagaaccgtcctgaattcatgctgcagcagactgggtggttactcctcaggcaatctgaaatgaccagagtacagcctttcagtattccagccatatctacagtaattatttgccagcatatctaaaagaaggcaggcatttcctgttgcacacaaatgggacattcttatctaaattactgtttaaacaggtatttaagaaaagactatcacagtcaggaatttactgatgacggaacacattagtttagggctggacacattagttgaggactaaccattgtcaagaaaggaagtatatcagcatcaggaaggtatagagaatattttacaactcccatatgggtcaagatggaggattgtaaactatgccatttgcatttggagaaagcaggagggtcacaagtcctggcatggagttgtgcttgcgtcaatatgttgctgaaccctggagtaaccttgagaggcagaggctgagagtcatagctgcttggggtctctgtttccctatccataaaataagcatgttggacaagttcatccccaggtccattccactcaagcaatcccagttctacatagtagaaaccagaaggtggtcaaaatttggtgtgccaaaagcttataaaatgtatttcctggaaagacactctgagaattggtttggtctctcccaacatgtaacctaggagagactgtgctctagctgcctaaccttgctctaaccagtgaaactggaatttattcccagtagaggcttataaaactgggctgttattctcacattaagtagactgccctctggtgaggactgtggtttatgtgtgggcagaaggtgtggtttactacctctaatttgtttatgttgttgatggtggtttcagaagaaagctgcaccccttcacatgctaaagagtgaccggatttacttcctttaaaaaaaaagtgtttaaaggtgggcagagacatgagggagcattaatgtgccattgctaatggaggagcaactgggatccctgtgaccacagctctgcttcattcagctctgcatgtgaaatgagagccccaacttgtttattataattacctaagtgtggcttggtggcttttggcagagatccttcttgcctccaaaggagagaccaaaactcaggagctacacgctaaaggaaggaggatggtgtgcattctgtagcaaggaggctataattctaatatattctgggtgaaaatattcaaaacaacccccaaaagatgaagatcaaaaagtaaatgagattgagatctaccttctaccacatggcaaacaaagataggcatgcaggagaactggataaacagcgtaaatgtaagttcaaattcattttcacagctgacttgatgcagacccttccctattaccacaaaacagaagagctttcttacagccaggagtcttacataaagaaaagaaaataattatgcatgtctggcagaagagggagttgtagcaatggcttgctggtaaaacggaatatgagcgagcaatagaacactaacttaaccacactcttggtttgataagaagcagagagtgcccaaaagattgaaattttgttagagtctcaaaatgttttatttgaaaatgagcaatggtccttgttctcacaaggtttggtaactaaaagacagcaataatttctcatcttaaagagattctgtggaaaagagtccttgatttagctaattttagcttgaactctaccccattgcaagcacagtatcttcagtgttaaacaagtttagatgttgctaaggagtgcaattttctgcccccattctaagctctaaaggcccccatattgagtttcccaataccacatcatattaaatgtaaaatcattcaaaaccacagagatgaagagaatgtcattgaaaaacataaaggaagattttttgctttttttaagtatgagaaaacattatatattttgattaaaaatgtttgcagaaaaatatgaacagatgtgctatgcatatgtgtatacatacaccaaatagcacttataatttgagagggggtaatttcaacattgctaagtggtaacacaagctaggtatttaagggaatgatataatatgacaacttcatagactaccaaactatgtatggtctctggaaattgtcattatcaacatgtacaataactagtagcattaggtggtctgtacagtatccttcatgtctaattgagtcacacagtctaagacacttgatgggcaccaggcactgccttctaatgggaactgactttcaaaaaaaaatgcattcagggcctcttctatataaattactatcgtttgcagcaagagagaattataaatgtttgctggcaaaaactaaatttatttacaaactgagtctaatttatttatggctgcagtacaatcggcttttgttgaaatatttatgttatctgtacttctgcctcactaaactctaccacaatcataaacactgttgaaaaattatttgcagttagcaggatttaagctacccattatatcaccagctagtgccagtaaacttttgcactggttgataaagtttcctccgtggaataaatatacatttgactttcaaaatctttggtaggctccatactatgaaaagtgaaggattaaacagatgtcccagacttcactagttttgtgtgaatgcttcaattgcacattccaattgaaattttgtggatagactagaaaagtgcacagatttaaatccttttctagcattaaaagaggaattcgatgattgaagtgttgaggtgataatctttgccaaagatgctactgctcagacttgaattcatttacccattccaaaacatttattcaataaataccacgttgtgcctggagctgtgtaagttgctaaggatagaaatagagttgaataagataaaatgtctgccctcaagtagcttaaagttcagtagtgaagacatagatggtaacgtatgtgacaatgaaataaaataaggcctaagatgaggttaggaaaagtgctgagtgctaaaagagttgagtataagtaattctgcaattgggcatgccagtctcgtagaacctctatccttaagtttgctagaactatatatgtactacatctttaaagaaacctcttattttgattattggtggaaacgcagttgccattcacatttatttctgagtatcactaagctcttcatagtaacgtgagcatcagaatattttggggggattatctaccctcactgatgcttccaaataactcataaaatgatgaaacattgccacatgttctaaaatggcacgcccacatttccattacaaagtaagccaacagaaaacagcacagagtagtgggtagttcccatgtcaactaaatatgtatttctgcttgatctgcttcactgaaaagggcccagaagttctattgtgaataggtaggactgctgtgataccagtgaaactcccaccagcctacaaatgatccaaaccacaatatttaccttccagctagaattgaaagttattccaaactgaccagagatagtcctgatggatctcagaacagtgatgtattcaaacgaggactggccagagcaccctggaacctccagtggcatggcaccaatctggagtaggagttcttagagaagtgtcagtactattgtcttctggtgtcttacactacccaccagataatgaatttttctcaaataatttctacctatgtatacaataatcaaagtaacttaacaaaaagccaaagtagcaaaattcattttgagagctgtatttatttgatgggggaaaaaagatctcaaaaaaggagcttttcattcatcaaggtgctttgtaaaaaagaatacccaaaactcacatatttggagcttcatatttagtaatataatcataaaatattttgctgtccacttatatcaacatgatataaaacaactcttacttagatccaggtgttattcactagaataaacaatatctcagtgatttttttggtgttttgctgatttttttatgagtttattctggtaaaccttctttaactgcttgttctaacagactatagctatgctaattaagttacataaaatcttctggcatcatattgcttaaacctcaggataatcaattgaaatagatatttcaatagcattgtagaatctcagagctaaagaaagcaagaaaattttcaatttattcatctaaacacctaaaattcttactaacttaaatatattgtggataaagccatgtaaatctatacgaaccatgactgctcatgagaaaaaattataactgttataattctatcaaaagcacataatgttaagaaaatctactggagacaggaaagatacctgaagtctatagaatacacaataatttaacaggcttttgctattgttgctttgttgttttgttgctgttgttgtattaatacgtctacttcattcaagtttttaatactcatcaccactattaaatcttaacaactatgatccaacatatgccacaaaacattaatcatttagccaacaagacttctacatgtaaatcaccatgagggggtcacaaaaaagaataaagtgaaattgctgatttcaaaggacttacaatcttgttggggagataaggcaaatgcccaggaggatttaacttatgtaatataaggctgcattaaatagagtcaagtgaatggcacagaaaatgacctcaatgatcaactctaaaagtgatattccatttttttaagagaaagctgaagtgaatgctggctagaaattctagttgtgatgaaggcagataatcaagaggattgtgaaacaaaggggtatagactgtggccaagccttggagaggtaatgactttaaattggattgagtttatcatatttgcagaggtacggcagacacagaagaaaggattagagtgatttccactttctattatttgacataatgagaaaacagagggtggtccacatctctggtacatattatgagccataggagatgcttaacatgtcaggttttggtagcattgaactcttctaaataaacatatttatttggacatagttaagtcaaaacaagtcacctggaaaaaaggttacaggtcattaatttgcatagtacaaaggatttatgaatttttaaattaaccctcctggatctcgacaccatttcaaagagtagggcatatctgcatttttcttcaaagtttagatagcttaaagggtcaaatgaaaatgcttggctgatgaaaaaccagctgagccaatttgcttttttctagatggaaaagaagtgtattataaattcttccaagaaacagcattatatacatcaggtcaaatatatatacaaaacaaatgagcaaataaacaactgcaacaaagttgcataaatatttggtgagtcacaaaaagatcatgcacactccaaattcaagagagcccaagtatgaaagatgattaaagcacacctccactgaaactccactagactataaggggatgagggcagggagcatgggtgcctgtttcactgccgaatccccaggatccagcaatgtttctagttcattacaatgattcaatgtgattgtgttgagttgaaaacatcagccaaagcacaccaattttactgaaattggctggtacctttttctccttctctaaattgggaagttctaacataaatgttcaaaaggcattacacaaattgtgtccttagtctgcttaaaggtacggtaaaaatgccccactgaagaaagggaaagtgactactaaatttacacacactcatatgtgcacacataaacacacactccaaatgctcaagatactgatagattaacaaccaaacacagtcaattcagagtttatatcatgtcctcttcacattgcaaccttttcaaacaaatttgtttttcttttaaaagaaaaaaggaataaaaaacaaacaaaaagtctctacatggataatccatatttatgtccttttctcaagacttttactaagttcttcaggaagaagaacagtaaaccagtgtcaaatattaccaactaaatttgtttccaccaacatttgcagcagcacctgccatgaactagccataccttatagattgtaaaacataagcttcatgaggatagggaccctgtgtgttttcttcactggtgcctttgcagcaccaagcatagtgtctggtacatagcaaaggttcaataaacaaataaatataaaatttgttaaataaataaatataaaaatggaagaatacagaaatgagccttaaggagtccagaaactatagaagctatccccaaaccaggctgtgcctctgaattccatatgaagcttattttaaaaagtactaattatatggcatttctagaattagtgataaagaattcttactgacctgatagaatcatttttcataacatctgcagcttcctgttctatagtatgaatttacaatatcacaagaaattcaaataatctataaaccatagatccaagccaattcctgtttaaaccagaagaacacaatgggttcaagtccaccaaactagttatataaccccagaaaattctcttaatgtatttgagcctcagtttctttattcatatttgatgctgtcatatatggtacccaggagtcacatatgacaatagagcacatgacttgtggctatttccaattgggatgtgctgtaatttttaaaaatataaatcagatttcaaacacttgatacaacaagtaaaatatcctgttgataatttttgtctattgattacatgctgaaataatataattttggatacactatgttaaataaaacatattagtaaaattaattttacctgttttgttttacctgctttaatgtgactactagaaaatttaaaattactatgtggctcacatttgtatttccataagacaacactggttttcaaaatatgacaccaagttatattaagaattagaatagcaaggcatggtggctcacgcctgtaatcccagcactttgggaggcccaggtgggtggatcacttgaggtctggagttcgagaccagtgtgacaaacctggtgaagactgtcactactaaaaaaaatacaaaaactagctgggtgtggtggtgcatgcctgtaatctcagctactcaggaggctgaggtaggagaattgcatgaacccaggaggcgcatgttgcagtgagcagagatcaaggcactgcactccagcctgggtgacagagtgagacttcatctcaaaaaaaaataaataaataagaatcagaataaatgatgctcttgagcatcttttgtaagctttagagtaatatacaaatgccaaaagttattaagtgacagatctaaaatgtcattgtctttcaggtctacctgcactcagctagcaaaagattatgaaatggttcatgatcaattcattctccaccactcccctattaataaatctctcaataaacacttgttgaaaccaaatgtagaacaagatcaacatagtcattgacatggtacaaaaagatgagctaattccgcaacactcccctgccatagtttctgtgacgatgcaggaaacagcttgggctaaacaacgttggaggaaggtttacatttgtaagaggcattattggccaatgaacaatgagcaatatttaatgatagacgatgaaaacctattccattatttcagcccaaagtgcaggatatgagggaagtcataagattaacctatctctttccctatatcttggataaggcagttcaattcctcccacaaatatcccattccatcacttcaaaaacaatgtgtgctttgaaacacctggcaaagaaaagaacatgaagaactttcttgatgctcttccattgctatggtgcagttggtgaacctccaaaaaccttagctgacgaatgaacatgagacagatattcccagagtgtgtatacatgacacgaccttgataacattctcaagagttttaaattcagttaggttcagagataggcaaaccccacccagcattctcccaaagttctattatatgaaagtgaggagtagaaaggattcctctgtgggtaaaaaggttgaattgtcatgggcagctcattctgagcttttaccaggtcatgcctctagacattttatgaatattaattgatgtattactgcaatgtaaggcagttgctaacctaacattccagcctttgttccaagccttgtatcattttcttctgggctgttgattttggagtggctgtgtaatcctagtgaactgctagcaaagagtgatcaatcaacactttgaaagcttctggttcatcccaatacctgggatgagctttgataaatgatattcttgggactgtgtgaaatttacattgtagaagtagttaaatacatgtggaaacatggcaggctattgtttttgttatttatttatatttaaacaaaatcttttgtttgcaacaaatcctcacttggtccaagattattctgctgcaaactcaagtcactacatttctatatgcacgaacattagtgctctctctatggatttaaagattgccactcatttatacacatttgggggcacataaataataatataaatagaaaaatgttctacatcccattttaaaaacctggataaagggattgaagaacatatcatacacttgttcatggatgagtactaaatttatctcccaataatactttatcctgggtcatcaagattgacattcattttagaaaaatgtaggagggttagagttcttcaaccttcttcacaaaaatcagccacatctttttgaggacctcacaaagttcttttgtgactggtcacagtcaatgtgcccatctattttgtgtccatatatatcctctggaatgcggcttccctgtgttgttttctttgtcagccttctgatcttctccattctctgctcctggtgagggcctcctactgttctgagagctgtagagagagcagtgagcaagaccaacaatactcctgctcctgtgaaccttactgcttgatgggtagaggaggaaactaaaccaacacacacatagagaacatcagaaagtcttaggtgctcagcagaaaaagcagggtgaaatgtatgtgcgggtggctacttcaggtatggaaggccttgctaaagaggcagcattgaggatttacacattgaaaccctttcagatcccatttaggtgtcatctcatctgttaagggttcccactctccatgttcatcatctcctcaagctccagagtgagttccttgctttatggatcacaaagtacataaaacgtacctcaaaacatatccttttgtcaattgcctgttgctattagagtgagttttatttatgtccatctcctcgttttgatttccagtgactttagggcaagggctgtgtttcatttacctttatatcttccctcagtggctgtaaatacactagatgctcaaattcaaattgaaccaacttttacgcacatgtaccctagaactgaaagtgtaatacaaaaatgttaattatgaggagtttcgtttttgaaagctgtactttgtacctcacttagctctgaatctgacagatttcaaaggaagctctcatttacaaaagtcattgccaccacgggaagaggtattttctagaattgtagactactgaccattcagaatgcttgcccaagtaagtgacgtgtcaacttttcttctagaagaagttaaagttggaaaacaatgatctcttccaatactttttagataattaccccttggtccaaaaacagaattctcaagcttgctgcttgcaaatgtgccccagaagtgagaattttgtagttgaaaaagaatcagaaagagaagcttttgataaataaaccagagtactgagctaaaccttgtacaacacaagctagatttcaaagtagatggtgagaatgagcctagagtttgaaaattctgccagaaagttttgttttatgtttttgtggagttttttaaagaaacattttgcttttttgttttggacttgaagattgtgctcaatacagtttttcttcctttaagtgacacctattaaaagagaaaagtaaattgttcaaatagaagaattaataagacaaataaatgcccttttctgaagaatctaaattttcttacttgggatctgattatgaaattccaattataaataaactcccaaccccttacccaaaaaaggaatgtctccaagtttagactgaggtaggataaatactcaacattctattccaaataccaagaacaaggtaggtattttccctgctgcttccttaccctgaaatttgacgttcattttaatgatgcttactttattacttgtcagaaaagtgaaatggcctgtcaattttatggagtttctcctacctttcaaatgattatattacattttgaaataagtgtatagctcccacctcctttttttaacctaaatggttcatgtgtgggtttggtacttggctacgagtggaatgaaatcataatttcaggagtccaaaagaatagatcaaaatcatgccaacactttcatggatggatatatgctgctaaatggatgtttacctagaaaagtcatcatctggcatgcaacagagtgaatgtttctaagcagctaactcatgtatactaaacaaatttggcttggctgctgtgagagctgccctttggaaattctcaacatacatttgtttgattgagccgtcattcccagttgatctgctgatgatctgtgtcactttgtttaaatgtcctggtgtggttttctatatatatacagtgaaaagccagtatgtttctgtgatggattaaatagaggtgaaattcgagagtgactcctgtttttgattcctgcattctcagacaggtgggtctggaatgatcaagaatgtcacattcaaacacaggggaaaatatggagcccttttgatttaaaacacattaccgtaaagatatatttgctactgtgttctcctagtaccagaagctatttaggatttcccacctaaacaaacaccatatgggttaattctcagcatccttttcagatatccagaaacaggggacacaaaactcactgcttggaaatgcaatctaagagaagcaaacaaggctcattgctgatgtatggattcagaaatcaaatgcaaggtcaggctagaactgaagctccagatctcaaatatcccagtaatggttcagatggaaacccaacaccacagtgccataccctgtctgaggcactaatcaagcgactgcctgtttgctccgtggttaaagcacttcctgcagctaatcttcctagataggctctcagctttaataacctatggggtctgctgttaagtgccgggatctgggcaccatcagcgttgatgtctccactctgccaaaccccagacagcacgtgatgctcacgtaatccctccccttagcttccatggatgcagtagacaagggcctgccttaagctaggttcccctactcaaaaaacatacagccctgatcaacctgctgtcatacctgaaattctcccacccccacccctgacccacttagcattgtttctctgggctaaggtaaaatcatctccaagagttctgaccattaatcgtttattcatttccatttacatttaaaaacctactatggactacacagacactgaatgtggactttggaaaccaaaatacctggcctcattcttggcttcacagagcaacatttcagtagagaaggaagacatgcaaacaaaacatagtacccacgatcaacgaactatgtccaaggttcagtggagagagggaattaattctgtcttagggtagaaatggctagggaaggctgtcaagaagtggccacacccaagaagggaagaataagctgaagaagaaaggtggctttgaaggtgtttcccagagaaaagatgagggaaaaaaagaccctactagaaagaagagaggacatatctaaaggtatgaaaagtatgaaagagcttagcatgtgcatgagactaagcattcctcagtattgtctgacttatagtgagaaatagagtaggtgcacatgcagagaaagaggcagtgaggatccaaacaatcaaaggattcatgccataccctagagcttggccttcctcctattgtcaatatggaaaatggaaagatcagaactggatattagcatgatcactctgattcaaaaaagaggagaaatttaaaattggcagaaagcagatggaccagtcagaggctgtttcagtagtccatgacagaaatcatgagagcttaaaaaaggggctgtgatgctggaggatgaagaataacagggagagatttaggaagtaaagagagtccaataagggagtggaacggggataaaataaacttcaatgagctcatatactatgtcatgagttaatttatcagtgataggtaaagttggccactcccaggaactgggacacatatgggggctgaggacacagatagagagaagattggaatactgaacaacgaagtgattagaatactgaacaatgaatcaggagccctgagcccctgggaggcaatcatagagccctgggccatctagacagtaatgaggctgcagaaccaacaggcttttcccttgcttgaaggaaacctggagatcagaagatcagcatggggatggtaggaaaaaaatttcattcttacatgtacaaatagaaaaaataacacaaaaattagctgggcatgatggcgcatgcctataatcccagctactcaggaagctgaggcaggagaatcgcttgaaccctggagacagaggttgcagtgagccaagattgcaccattgcactccagcctgggcaacagaatgagactctgtctcaaaaaaaaaagaaaaccaggtaagacattagaggacaccttcactagatcgtgcagactcttaaggaatgttgattccctaacaaacttcatgcttgacattagtagctgtgcctttatattgatcacccttatgttcctacactttacgatgttcaatattctttggcaatcctaactcaggtactgccttcacaaagtgtttgccaggtacacacccctttccttgctcagtgttgcctgaagtggtattcctcaggaaaggctccaaaaccactcctgacctcagcagttttgataggcacttattaagcaaaattcaacttacatgttatttattcctactgttgagaactttgagagaaaaaaagtggcttaatgtcaagaaaagtaatttgttaagatgatttttaaaactcattcagtgcatatgcaggaaatcctgcaaaatcaacattctctatacagcgttcttccctgcttatcctcccatcccagaactctaaatccccagagcacagtactgggtggctccccagcccacaggtccctcagcctatgtgccttcttccccaaaggagatctgatccttccccaaattaatgttttgtattatttacttgtgtattttcttgatggaaaaaatatagaaaagggaaaacagacagagggtagaagttgggttttatttattatggtttaacattatttatgattattgtaatttaggtccaacatcccaagagtctcattgtaatgggtgcaatagacaccaataaaatagtgtcacagagcacatacatatattcttctacttcctttttttacaagacgtattttctctatgcacacaaagcaaatcctgtcaaattgcaatatacttctaggcattctgttttggattttcattttaagaaatataaaaggaagaatgaactgcaagacacttatttattttatggacttatttgcaccatcgaaaagagaatgacgataaatcccttttagggagggcttgtgtttaccacttcatagccattgaaagtaaataaaataatatggaataaaataaaaacaagatggcaggggctctatattaataagcccaagtgattaaaacacagatcaaacaataagcttcttttctattttgggttttgaaatttagtaattctattaaccctctgaaacataaaaagacaaattttaagtatattttcttaactgatgaacataataaaatttagatttataagtttggttattagtgtacatgcacttagttctaactcagtccctggtttcctgagaaaacccaaaatggaagatagataaaaatttacatatttggctgccaaatatttttgcttgggaactgagagaccaaatcagtcattgttgagcaacccagtctcacagaggactctctggcagtctggctctgagatcatattgcgataaatgcttttctatagaactagaccctatactaattcaagagttttaaaatttttttaaatagctaagagccaaatttcttcctagattaaaaaaaatagtttgaaaaaagttgctaaggatataagaaatatataaactggagtttttattggttgtctctctgcaaaatatgcacacacacacacaccaccacacaagtcttgcctaatttgaaatgacaaaggccaatctttcccacaatggaaatgcacagagggagaaggccaaacaacaaaacaatccagagagttaaaaaaaaatttttaaggcttaccaacaaacaaaaaacaagctcaaaataaattagaaataaactccaaacaaacccagccaaacataaagcagagaaaatccaaagcaaacaatccaaaaatctttaaaagtatagtacagtgatcccacactgttgcctatggggattgctggagggggaagccccccaagctcaggctgatccgatgggccagttcctctgaagcctcctccacccctcccactgccaggcttcctggagtcctgccctgcagaccagagagcgccacgcagagaaggctctggccaccccgccggcctggtatttggctccccagtcacccagcgcacaagtatgatggatgatgatggatcgcagcaccaccaaaaccgtgtgaatttcccaaggcctctgattattctaatcgagcccccagaagaagcacagagcttcacaaaagcctccaaggaaacctcccattccccttgtctgcctgacacagactccactaaataaagcaatcaggccctgatatggcctcctctctttgacacacagatccaggcctccatattcattgttccatgatatgatttagccttgaatgaatttttaataaacacctacagttatagcacagcgaaatggccactctggcttctcccaggggaagataacagtttatgaacacttgccagtcacagctttgctaatgttctatcgctgtgctagacaatatggtcaaaagggttttttctctatcatctagtctctttctctgtctctctctctctctctgtctctcctcaccactgcctgctctctctttccctccctccttctctctctctctctcattagatctttcttaaaccacaaagagtctctgagagatacaactgcataagataaaggcacaattatagaatttgttcaaaacagataaagagtatcacagccagactcagatatgcataatggaattttatatgttgtaataatccaagctaaaaaaaagaagagtgtagtactatttcaattgagttcagtgtcctcgacttactgagatgtttttttgccatgtaaatttgcagcttgtgcgatggggagactctcaaggctttgtgactgctgttggcttcttggaatgttccagatcaatacagacagagttaatagtaccatacaagtctataaaactccacaaactagccatatttagaaatacagctagtgtacttgcagcaaacaatatgtccatttagtactttctaatacttactgtcatccaatttctaatacttaggtacttaactgttccccttcccctaaatgtactacctcttgaactcttaaaatctctcagtatctattcacatgcaagcatatgagaaaaagggtggttgtacttctcaggagtggcccccaaatttctacatcagagtagcatatggaaatgaatttaattgaacaagggtaaggagaaggggttgaagctgggtttacagagcactttgcataagaatgagaaaatgccaacagacttcatcaaataattggaagaggagtgtggagaatgttgaagattatgggttagcttgggaagactttcctagccatggttaggtaacaccacccatacttctacactataattttgtttagccattaatgatatctcatacatacactttgattttttccccaattagccatgtagctttaaaaaccataacattttgaaatagttcatcctgaccaacaactcaggatattcaaccataatctttgtttcctaaaccagaagggtagataaataagaacaatagattacgcttttggaaaaccagatcctgttcctggcactgtcactaattaactgggaaattctgaacaagtcttttcatctctctgggaatctatttcctcatctgtaaaattactgaatgcagagagcccccagggtcctttccagcttatattctatgagtccatcaatctctatgtgattgtggaagtaaattccttgaaagagccacaagtatagctgctttgtaccataatcagcaaagtcctgtctgcatataaactcaagaaaagcgattgaaggctgatgaagatatcatttttagtttgtgttatgaagctggcttggataggaattagaacatggaaagcaataaagttttgaattgtactgaaaacttactatgtgccagactgacactctcttacgcattttacatcattatcttatttaatgtcaccgtaaaacctactgcataaataggtaacagtcccatttgacagattttaaaaactaaggctcagagagtttatgtgtctcacttcattaaaaccagtcttcttgagcccaagcataatatcataatattctcatattattctatttcaaggttatttggttactgtttttttttgttttttttttttaatggagtctcactctgtcacccaagctggagtgcagtgatgcaatctcggttcactgcagcctccacctctcccggattcaagaaattctctgcctcagtctcccaagtagctgggattacaggcacctgccaccacgcccagctaattttttctcatgtatttttagtggagacagggtttcaccatcttggccaagctggtcttgaactcctgacctcatgctccacccacctcggcctcccaaagtgctgggattacaggtgtgagccactgtgcctgtcctatttcaaggttattctaatagttccatcgctcccaccatttacagtacccaaactatcaaatgacaaataaactcattaaaatttgacaataactaatatgtttctttcctttccaaaagaaggctactcacttcttggcttcactttgctcctctctataaggttggttcaaccaactccaggtaattctctaacttaagatttacacacatattatatcaacattaaaggctaacttgttaaagcttcatgaaaatttagagaaaagccagtcatcattgattatcttaccagttcacaaaaacattttttgtaatttattattactgtaatagaacatttgttattatttcaatcaacttctaagtgggacctgtaaggaaagtaaaaatcgaaataaaactacaacaaaatgtactcttgacatgttggcagtcttctcaagaagggcttgctacttatatcttaaacacctcaaactaattgtaaaatacttcctcacacataatccaaaataataacttctgaggatatttctacttaggattttaatccaaaattaggagaggaaagaaatacctgtctatctatccatatggaaacatttacctatctatattccacagatgcactgacaaggaattcaggcattaggagagtctttatattgttatatgtaatcaaatcaccagtcatcagactcttctccaaggaattccacttcttgatggttatccagaatactgtgacattgacatgcaaaatccaagtttggatccatctacttattggcctcagaaattgatcatgtttgggaaaattccaagatttagagatctgcaccaacagtgttaacaaagagcaggatatagtgtgatttccattgctgcagtcatagtctgtgaaatgccaatattctgcatatcttcaaagaacagaatctgtctccaaaaactgtacaaaatagcccactacaaaggaaaatccttcaagatctttgctattgaacgaggaccagaaataagaggaaaacttccgagaacagtataaaaatgacagatataagaggaggccaagcatgccatgaaatgagacactttttgctgacagatgagcacctttgaactctaacccaataaaagaattagcactcccaatgtataatcagtacagcaagcaaaatatgtcaacacatgataggcaggataatcaatcgacatgcgaggtaggaaacagccagactaaatagcaacccagtcccactgagccagacaggccttcctgctccttcaatttctcataccacagggaccaggaattaatatgcagtaaaggaaaacttctggtaagtaaaacaacagagcaagaatgaagagttctcactaagaagtgattaggattcccaaaacacggtcttgatgtcttgatttttttagatgtgttctttaaagaactttctcctgtcagatactaaaaactttgaaattatcaaccacagtactattatttattctcctttcccatgaagactacagaaatagtaaaaagagcaggcactacggacataaacagagctagcttttaatcctggttggctgtatgctaaccactgacctcaagcaagtaacgtaagcaggctgggcctcagttttatattcatctgttaaaaacagaagaataacactttttaaaaggagatttgtgacaattaaaaaaaaaacagaataggtaaagtgtcttattcaacacagatttgatattggcaatcccagtctcctcacagctagcatggtgtttccaaccctgtgagtgcttaagaaatgtggagatgccacatatattaaataataaactcacagaccacaacagagtaatgtagtttcagacatgcttaagaaggggggaaattggcctaggttagaatgccctatttaccatagctctgcaacagtgagagagtcacctaacctctctgggtcacagtcaactcatttataaagttgagcaaataatatctcaccaacctaaggcccgagctgagaagagcgactctcacagttcctttcagctttagatcactcattgcaaattatctgttgctagtttatcttatcttatgctctaacttgataaaatcgaatagaaattgcttcaattcctaaatctacatcccttcaggaatttgaaaatgattactttgtcttattttgcttgtgttttccattttcccaaaggagagttactagtgttctctgcttaaaatcacttagcaactctgcagcattttcatggcgtggtttgaatggtttttgatagcaatttgttttaaaatattatcctcaacctatctagccccaaaccacaggtgagtacattttgtaacattttacactcatgccatctatatttcaagattctgcctgctttaaacagagtagttttgtgtgatgcagtactttatttttcacttattttaaatacatttgtttttcaaatagacgctttgcaagaatgactttccagctatacattttgaaaccctcataactgtactcccatgactttagcagcacttcaaagggcaattttcttcactgaccatggcaaatactatttgaattagctaacaatttttctttggattcatgagacagaagagcatgcatccattgaagctaggctgatcattataattttaacactactgagaggatagtaacctaaagtcagagaaaacgcaatattgtgggctttcctaaacaactgcttaaacttgtttctcttttctgacaagtgtggatatagacaaattcagatattctagtatttatcattcaccaatactatggctacaaaaatgaaatctgaggcctaatttgccttataattcagaaactgaggagctttcagacagcaacaataagtcatttttcacgtttattttccatgcacataaagacacaccactctgccatcaacatatcaggcgaaatcaaaaatggcttagcacaaaaattacccagagaatggccatcagaaaaacagttgtgacaaagcaactatgctaaaattgtaccttaacttgaattatatttgcattcatttgcttcctaatacttttggagaactttgtggagaaaagactgggctttttgttcagtagtttttaaaatatcaaacgttctgtccatcagctatcccttcttggatgtgacaatgtgatagaataaagaccgacttttcttttggaacctcattgacatggcctttggcagcttacaagacctgtcttcacttattgtgtcctttgtaccctgatgccttcttataaggaaggacaataagagaggcctatgacaatatctcaacttttccccctggagactgagattccatggttttttgtgaaatccagcatgagtaatacttgttatcagagaagaaaagcgctagacaaataggaaacatcatttgacatttctcctccacatttacaaagttaagtgagttgtggaactgtgcctaggagggaataaatatctcatcacaaactagactcaaccagtcgtgcccattgacgcctatcaaaacacagccgcccttttcctttcattctgcttggattatttagatttctctaaatgttttcaatgaactcaaagactagttatttcaggacaaaataattgacaatgcaaaacattgtcattattttattatctgcagagttgtccaacggttagcaaaaattaaaaggacttacccatagtccacaaaaacatgaaatgcttagtcttctatttagatagaatcagggatagaaatgaattgtaagcatagctcctgcccattttccactactgaatttagtaatcttgtctatctccatatgaatatatgcatatacataggtttgtgtgtgtgtctgtatatatgtatcaccattccatatgctaacaaatgtggaaaggtcctttactttcttaggatgaaactattaaactacatataaatatctgaagactttagtaagagaaactgagcctttcaattttcattttccaaatgacactattgccagaaaaaaaaatgtttggcaaaactctttgctttctaagcattaagaaaaagaaggtcataaaaccgaaaggaaagatattgctctctaaagaatccaaatcccaaactaaccacaagcaggaatgtttataaaagtactttcttgaaactctctctgttagatatttcatgctatagaaaaatccttctgtaaagaacatcagtatatcatggactcagcttgcaggttaaaacccaaggataggcactgcactgtgaatttccctcctgactgtatgaagaagctgtagaggagatgtatgcttggtttcctgacgtccgcactctgagaggctccactaatccaaattgcatattgtgactccagatggcatttccaatataagaacaatgacttctgcaaaagcaccaaagagcccaaaagttgcaaggccaggtgccatccacaccttacataaatatttatgttaaagaatttctgactgggcgcagtggctcatgcctgtaatcccggcactttgggaggccaaggtgggaagatcttttgaggccaggagttccagaccagcctggccgacatggcgagacattgtctctactaaaaatacaaaaagtagccaggcatggtagtgcatgcctgtgatcccagctactcaggaggccgaggcaggagaatcgcttgaacccgggaggcagaagttgcagtgagctaagatcaagccactgcactccagcctgtgcgaaagagcaagactttatataaaaataaaaataaggctgggcacggtggttcatgactgtaatcccagcactttgggaggccaaggcaggtggatcacctgagatcaggggttcaagaccagcctgaccaacatggcaaaaccccatctctactacagacacaaaaattagccaggcatggtggtaggcacctgtaatcccagctacttgggaggctgaggcgggaaaatcacctgaacccaggaggcggaggttgcagtgagccaagattgcgccactgcactctagcctgggcaacagagtgagactctgtctcaaaaaaaaaaaaaaggaataaataaaaattaaaaagataaaaataaattaattaaaagttttttttaaatttatttgggttatttttattacaatgatcttactcttgaaaatccatgctgttttccataaaaagaaagatgatgttccctgcgtttctcatctggcttctgtgacactcctttggcaattcttgcgtatgccatcaaaatcataccagacaaatgctcctgaaagctacgatctattgattttcatagaaggattttccccctacagctgacaaggaaaacaagcatcttccaaagaaaattaaggtaaatgccaaaatgtctcatctcttcccagtatgaatcctttaaaaatattaattataataatgtttgacttcagaagaaaggcaaaaaggaaaaatttgagtcaggtgtgaagaacattaggaatattatgatctaaataatataatataactgaaacatataagaacatcactaattttcatttgactataaaccaaccactggcttttcaaatgattggaacaatctctcagtttgggttacagcttttctcttcaaaagtttaaactgttcagttcagtgactgttgaatttcagctcctgaaatactgtataccattgagcacttacttttgtgttttattcatggtcaagataacaccagtgactttaacaacccctgcactttattcaaattgttttagaaaatatataaaagcagatttccttttaaaaacatagttaggaggattcctgggcaagatggccgaatagaaacagctctgatctgcagctcccagtgagaccaatgcagaaggcaggtgatttctgcatttccaactgaggtacccagttcatctcactgggactggttagacagtggttgcagcccacagagggcgagccgaagcagggtgaggcattgcctcacctgcaaagcgcaaggggttggggaactccatcccttagccaagggaagccatgagggaccgtgccatgagggactgtgatttctggccaagacactatgcttttcccacagtctttgcaacccacagaccaggagattccatcaggtacctacaccacaagtgccctcggtatcaagcacaaacctggggggccatttgggcagacaccaagctagctgctagctgcaggagttttttttttgtttttttttttatttttttttttgtacccaagtggcatctggaactccagtgagacagaaccaaacactaccctgcaaagggggctgaagccagggagccaggtggtcttgctcagtggatcccaactccatggagcatagcaagctaagatccactggcttgaaattctcactgccaacacagcagtctaaagacgacctgggatgctccagcttggttgggggagggatgtctgccattactgaggcttgagtaggtggttttccctcacagtgtaaacaaagccaccaggaggtttcgattgggcacagcccacctcagtgcagcaaggccactgtagtcaaactgcctctctagattcctcctctctgggcaagccatctctgaaagaaaggcagcagccccagtcaggagcttataggtaaaacttccatcttcctggaacagagaacctgggggaaggggcgactgtaagtgcagcttcagcagacttaaatgttcctgcctgcctgctctgaagagagcagtggatctcccagcacagcactcaagatctgctaaggggcagactgcctcctcaagtgggtcccagacccccgtgcctcctgagagggagatatctcccatcaggggtcaacagacaactcataaaggacagctccggctggtatatggtgggtgcccccctggtatgaagcttccagaggaaggagcaggcagcaatctttgctgttctgcagcctccactggtgagacccaggcaaacagggtctgaagtgaacccccagcaaactccagcagacctgcagacgaggagcctgactgttagaagaaaactaacatacagaaaataatagcatcaacatctacaaaaaggacaaccatgcaaaacctccatccaaagatggagcaaagatgaaaggtagataaatccatgaagatggggaaaaaccagcacaaaaaggctgataattccaaaaaccagaatgcccattctcctccaaatgatggcaactcctcaccagcaagagaacaaaactggacggagaatgagtttgatgaattgacagaagtaggcttcagaaggtgggtaataacaaactcctccaagctaaaggaacatgttctaactcaatgcaaggaagctaaaaaccttgagaaaaggttagaggaattgctaactagtataaccagtttagaaagaacgtaagtgatctgatggagctgaaaaacacagcacgagaacttcgtgaagcatacatagtatcaatagcccaatcaatcaagtggaagaaagggtatcagagattgaagatcaacttagtgaaataaagtgtgaagacaagattagagaaaaaagaataaaaaggaatgaacaaagcctccaagaaatatgggaatatgtgaaaagaccaaacctatgtttgatgggcatacctgaaaatgacaggagaatggaaccaagttggaaaacacacttcaggatattatccaggagaacttctgcaacctagcaagacaagctaacattcaaattcaggaaatacagagaacaacacaaagatactccttcagaagagcaaccccaagacacatagtcatcagattcatcaaggttgaaatgaaggaaaatttgttaagggcagccagagagaaaggtcaggttacacacaaacagaagcccatcagactaacagtggatctctctgcagaaaccctacaagccagaaaaaagtggaggccaatattcaacattcttaaagaaaagaattttcaacccagaatttcatatccagccaaactaagcttcataagtgaagtagaaataaaatcctttacagacaagcaaatgttgagggattttgtcaccaccaggcctgccttacaagcgctcctgaaggaagcactaaatatagaaagaaaaaactggtaccagccactgcaaaaacaaaccaaaatgtaaagatcatcgacactatgaagaaactgcatcaactaatggacaaactaaccagctagcatcatgataggatcaaattcacacataacaatattaaccttaaatgcaaacgggctaaatgccccaattaaaaggcacagacaggcaaattggatcaagagtcaagacccatcagtgtgctgtattcaggagacccatctcatatgcaaagacacacataggctcaaaataaaggggcagaggaatatttaccaagccaatggaaagaaaaaaaaagcatgggttgcaatcctagtctctgttaaaacagactttaaaccaacaaatataaaaaaagacaaagaagggcattgcataaaggaatcaatgcaacaagaagagctaactatcctaaatatatatgcacccaatacaggagcaacgagattcataaagcaagttcttagggacctacaaagagacttagactccaacacaataataatgggagaatttaataccccaccatcaatattagacagatcaatgagacagaaaattaacaaggatatccaggacttgaaatcagctctggaccaagtggacctaatagacatctacagaactctccaccccagatcaaagtaatagacattcttctcagcaacacatagcacttattctaaaaccgaccatataattggaagtaaaacactcctcagcaaatgcaaaagaacagaaatcataacaaacagtctctccaaccacagtgcaatcaaattagaactcaggattaagaaactcactcaaaatcacaaaactaaatggaaactgaacaacatgctcctgaatgactactgggtaaataatgaaattaaggcagaaataaataagttctctgaaaccaatgaaaacaaagacacaatgtaccagaatgcctaggatacagctaaagcagaatttaaagggaaatgtatagcactaaatgcccacaggagaaaatgggaaagatctaaaattgacaccctaatgtcacaattaaaagaactagagaagcaagagcaaacaaattcaacagctagcagaagacaagaaataactaggatcagggcagaactgaaggaaatagagacacaaaaaaactcttgaaaaaaatcaatgaatccaggagctgtttttttttaaaaaaggatgaacaaaatcaatagacttctagctagactaataaggaagaaaagagagacaaatcaaataggcacaataaaaaaagataaagaggatagcaccactgaccccatagaaatacaaactacaatcagagaacactgtaaacacctctatgtaagtaagctagaaaatctagaagccctcagaaataacgccgcatatctacaactatctgatctttgacaaaactgacaaaaacaagcaatggggaaaggattccctatttaataaatggtgctgggaaaactggctggccatatgtagaaagctgaaactggatgccttccttacaccttatacaaaaattaattcaagaaggattaaagacttaaacgttagacctaaaaccataaaaaccctagaagaaaacctaggcattaccattcaggacataggcgtgggcaaggacttcatgtctaaaacaccaaaagcaatggcaacaaaagccaaaattgacaaatgggatctaactaaactaaagagcttctgcacagcaaaagaaactaccatcagagtgaacaggcaacctacaaaatgggagaaaattttcacaacctactcatctgacaaagggctaatatccagaatctacaatgaactcaaacaaatttacaagaaaaaaacaaacaaccccatcaaaaagtgggcgaaggacatgaacagacacttctcaaaagaagacatttatgcagccaaaaaacacatgaaaaaatgctcaccatcactggccatcagagaaatgcaaatcaaaaccacaatgagataccatttcacaccacttagaatggcaatcattaaaaaatcaggaaacaacaggtgctggagtggatgtggagaaataggaacacttttacactgttggtgggactgtaaactagttcaaccattgtggaagtcagtgtggtgattcctcagggatctagaactagaaatactatttgacccagccatcccattactgggtatatacccaaaggactataaatcatgctgctataaagacacatgcacacgtatgtttattgcggcactattcacaatagcaaagacttggaaccaacccaaatgtccaacaatgatagactggattaagaaaatgtggcacatatacaccatggaatactatgcagccataaaaatgatgagttcatgtcctttgtagggacacggatgaaattggaaatcatcattctcagcaaactatcgcaagaacaaaaaaccaaacaccacgtattctcacttataggtgggaatcgaacaatgagatcacatggacacaggaaggggaacatcacactctggggactgttgtggggttgggggagcggggagggatagcattaggagatatacctaatgctaaatgacgagttaatgtgtgcagcacaccagcatggcacatgtatacatatgtaactaacctgcacattgtgcacatgtaccctaaaacttaaagtataataataaaaaaaaactaaacaaaaaaaaaaaaagaaaatctagaagaaatggataagttcctggacaaatacaccctctaaagactaaaccaggaagaagtcaaatccctgaatgcagcaataacaagttctgaaattgaggtactaattaataggctaccaaccaaaaaaagcccaggaccagacagattcacagctgaattctaccagaggtacaaaaaggagctggtacgaatccttctaaaactattccaaacaatagaaaaagagggactcctccctaactcattttacgaggccagcatcatcctgatacaaaaacctggtagagacacaacaaaaaaacaaaatttcaggccaatatcccggatgaacatcaatgcgaatatcctcaataaaatactaaaccgaatctagcagcacatcaaaaagcttatccactatgatcaagtcggcttcacccctgggatgcaaggctagatcatcatacacaaatcaataaacgtaatccatcacataaacataaccaatgacaaaaaccacatgattatctcaatagatgcagaaaaggccttcgataaaattcaacaccccttcacgataaaaacactcaataaactaggtattgatggaacatatgtcaaaataataagagctatttatgacaaacccacagccaatatcatactgaattggcaaaacctggaagcattccttttgaaaaccggcacaagacaaagatatactatatcaccactcctattcaacatagtattggaatttctggccaaggcaatcagtcaagagaaagaaacaaaggatattcaaataggaagagaggaagtcaaatggtctgtttgcagatgacatgattgtatatttaggaaaacacattgtctctgtccaaaatctccttaagctgataagcaaatttagcaaagtctcaggatacaaaatcaatgtgcaaaaatcacaagcattcctatacaccaataatagacaaacagagagccaaatcatgagtgaatgtcattcataattgctacaaagagaataaaatacgtagaaatacaaatcccaagggatgtgaaagacctcttcaaggacaactacaaaccacggctcaaggaaataagagaggacacaaacaaatggaaaaatattccgtgctcatggataggaagaatcaatatcataaaaatggccatactgctcaaagtaatttatagattcaatgttatccccatcaggctaccattgactttcttcacagaattataaaaaactacttcaaatttcacatgtaaccaaataagagcccatatagccaagaccatcctaagcaaaaagaacaaagctggaggcatcacactacctgacttcaaactatactacaaggctacagtaaccaaatcagcatggtaccagtggcaaaacagatatacagaccaatggcacagattggtcttacaccttccttacaccttatacacaaatcaactcaagacggattaaagatttaaatgtaagacctaaaagcataaaaaccatagaagaaaacctaggcaataccattcaggacataggcataggcaaagactccatgactaaaacaccaaaagcaatggcaacaaaagccaaaattgacaaatggaatttaattaaactaaagagcttctgcacaacaaaagaaactatcatcagagtgaacaagcaacctacagaatgggagaaaatttttgcaatctatccatctgacaaaggcctaatatccagaatctacaaggaatttaaacaaatttacaagaagaaaatgaacaaccccatcaaaaagtgggcaaaggatatgaacagacacttctcaaaagaagacatttatgcagccaacaaacatatgaataaaagctcatcatcactggtcattagagaaatgcaaatcaaaaccataattagataccatctcacgccagttagaatggcgatcattaaaaagccaggaaacaacagatgctagagaggaggtggagaaataggaatgcttttacactgttggtgggagtgtaaattagttcaaccattgtggaagacagtgggtcttccacttcccaagttcaagcatctctccaccaatcaactactgttgggcaagatcagcagttttcccaggcatagccagagtgatgtcctagaaagagctctgacctgcaaagcatggaagcatgggacctgcattatggctccaatccctgcagcaaacccaccatgaccacatctttaaattcccatggtaagttgggctgggtgttctctaagattcctttcaataccaagaacccatggatctgaaattcaaattatggggaaatgttgaaaatgaagaaacagaagaaatgtagcagtggtttctttttatctgaacaatgaggcaaatagcaaacatatttccttataggaagccggcccctagaaatagggaatggcagtttcctccacggacacaattataggtagtgaaaagggagaagagagccccactcctctggttcaactatgaatcattttcaaggaataggcttgactcatgactcaatttttactttcaatttctctcaaaaatgaagaactgaattttcaacctcactaaccaagcccataattcctaagaatatgatgttttaatataggatggtcactaaagtgttattgaagatgctttaactgaacatgaacatgcactttgaaataaaataggtatgtataaatgaaccttgaagataactaaaataaagtgtatttcatcaatattccattgaacacaattttatgtagggtgtgttttcatctcctgtaaaggaccctaacattccatagaatattatattatagtaggcacatttggcaatgatgacagtgtactgtatttttcttgtaactacatctccgatgaagtcactgcagtcatgacaaactccagtcccactggaatgaggttcagagaacggactaagaggtaggacatggtctaagggaaagggttctattatctgtcaaaaccaggtaaaaagggaaggtttctagttctttgaaggctaaacgattaggttctgatggcttttaaatgttgatcatttattattaatatgaaagatcattttaaaatgtattatcttcttgtcttctcacttttgtgaacacaattgtacatgctagaatttagcagattcaggacactgttaaggaatgtggagttgtttgccatacaagaagtacttctagattgctgtgctgttctaaatgacatttttcctttctccccatgaggcccattgccaatctcctttgcctgttggtcagtggaccattggcagtagatctaattcttgccagctttctagtgcatcttttacatggtctcatgtttgctcttctgcttcttaacactgtcttcttcttgctttcctttgatctctttcttcctgcctccttacttcgctgccctgttcttacagcctaggctaaccaacgagaattctcattttctgtggttggcaaaccaatcacttatagcatgtttgtttttttaaaaaaaaaaaacaaaacgatttcttacttcttcatgtttacaattcttttctgcattacgattggaagatatcactgctcaggctcagaaattctcaggtatttctaagttagcaacttccccagaaggtaagaggtgagagcctgaagaataaataggtggacatgattaaacatctcttgtctctaacatagattagctgtaataatccaagtgaaaatctgggcttctgaagaataattagcatagaataaagaattgagggtttaactttctgtaaagaacctggacaatcttaagagaaacacgatttatgcttcactatataatcatctatatttcataaacaaataacaattgtaagttttatttttgctctttttattggtttcttttttaaaaaaagatagatgttatcctagttaccagtataaggctcatttgtaccaataaatactctcaattatatgtttgaaagtcagagttctagctgagactttattcacatccctttgttattttatttgttgcctaagttgctgtgtgtgtaatgttaaaacttactgggaattagtgtaataatgaagagaaaactgatatgttctgtaggataaaatgaatgccatgatcattcacattccttaatggtgcttaatctaatcaaagtccaagccaaaaagcaaatacataaaactattaataatgcaactgagtttacaccagaaacaaaatatgttattcatataatacagcaaattacagagaaagagtaaattttcttttcacatatacaaaacttcatatttggttgcttcttttctttctttcttttttgtttacctagaacccaaaagcttttgtctaacagttcagatcacattcttttgaatggaaaggaatttatgtcatttaatggagtcaagaaagacaattattcacattttaaagatatagaacactaaaattttcaaaaactcacaagccttaagaattaaatttggccttttggcagagattcacctacccagatcccctgaatcatatgcataacgcagtgaaaattttatggacttcatagtcaaaaaatactccctttaaatccaacttctgtggctcaccagcatgcaactttggacaagttactttatctttctgaagatctgtatttttttatatgtaaaataaaatactaccaattttgtggagcttgaaaataagagacatggtacagcacaaagaaggtacacaataaattgtaaaaattgcccttatttttaaaaagagtgctctggtaagcagaaaaaataactaaattggggtcatgtgtctactagtgcttcccaaaccgtaatgtacatagaaattacctgagttcttcttaaaatgcaagctctgattcagtagatctaggtgaaccctgagattgtgcatttctaataagctcctaggagattctaatgctgctggtctatggatcatactttgagtagcaagactcactaagaagctagactctaagaatcattgcaatgtcactgattcacaaaaggcagaagtttctcaaaggaagatttcacacatcgaggtatcaacaggaaaaagaaaacagaaaaattggtactttgcataagccaattaacctctcttggtttcaaggaaggcaggggtttgcctaaagttcctttctgttaaaaagttttatgtttccatagagcttgtaaccatacttttctcaatttcaagttttccgatcacctgaaaggggaaactgattatttgtaaggggaaactgtatagaattccttgcagatatttaacctcagtgaacagaaaatctctccttattttggaagaagataaagaaactatacaaaagatgatcaaaactaatcagatttatcactggatgggaatccttggtagatatctttgaaattagtgagaattttttagcattttcctaataagatgccttattaataggaaacatgcagggatcaccaaatattaactccatcccatttctgatgaggaggctgaggtctgggggagactcatactttgtccacactcactagaagcttccaagcaaagacaaagattcagttctcctaagccccatttaagctgcctccgaagttttgaatacttcttttctgatatgaaatcctcattatgttattaattaagccatcattaattgccaaagaggtaatatgtaatctagaaccaaaaccaagctgggatataagtagaagacagatgtgccctgacatagtggatgatatttactcagtttccgatggtcccagagatttagtctaagatgcaacaagccaaaaaatgtagccttcttcctctgccagaatttatagtcaaatgcttaaagtttccattaagcccatgacatttcatcatcttctcaacagacctgtagttattccaattgaaataaagaaaaactcagtgttctgggagaccacctcctgtaggcctggctcaagagctcaatttcttagtctgaccttgaaaactaagacaagcatcatcaagactgctgaggtttcgtcaaattcctaccatgcaaagaccatgatgctctggtttaaaagctgaaaatagcatcctttcggtggcacagctaaaccctgcaactgattttatggtagtaaaacttcagggaagctttcaaagtttttctgatctgattggcagtgcatttctctaagtctaccatgacttccagaacaagttggcggtccatctccagttagtctaaaaaagtcacagctcatgacctctatgatcagagacctagaagacacaattgtacaaacctccatcttgaccatcatgtgaaagaagatggttgttcttctgaagggtacacaatgtgaaacatgactggcaagttttctccataaacagagcaaatctcttccctcacagagctgcctttatttgagcaagacatttgcaaagcttagagtctccttgaatctattagaaacccttccctgagtgaggaaacagacattgtaaatgaaccatgactcagaaacccccttgtaccagaaaatatcctacagattccagaggcattttatgttctattttcctgacatactagttctaactatctgattcatttatttttttgtttaatgctttaaccagtttctgcagattattacagtcaaacaagtgatttctttcagggttagtttttttttctccttctgactttggaagggtttcagattcagttgaaggaaagactctgttatatactacagaaacactcaacaccatatattcagcttaactacaataagaaaagccagacccagatgtcccaagctaaatcgagggaaaagaggaaaattaaaatttagtgttcatttgcagaaacccccccccacttgcatgtgcctcagataaccagttggaatcaacgaaaatttataagcttacagaataaaaatctaattctcctgtctcagaggaccttggagcactttcaattttttatgtactacacagatgacttcagtggcaccagatcacttatcaattaagagagaagaaatgtgcatgtccatgctctttgcacgagaaaacggagctatgattaacaatctcaagttgtccatacacttgatctgcatttaacatgcaggcattctctcaaattctatccagatatggtcatagttgttgatacaaatcaaaaattttaaaaagatctgagctttaattcagaaattccatttacagaaataagattatgcaagaaaatgtatctaataaagagacaactctatgtaacatttgttgattatgaattaggccctgtactaaaactttatatctagtgtcttcgagtcaccctatgaggtatgtccgaccactatattactttacagctgaggaaacaaaggtttagaaaaggcattttgattggtcaaacagtaagcgatagagcatatttaaaagcccacattcttagccactttattttgctgtgtctgagtgttagagcattatttataataatgaaaaatctaagcaatcaaatgtccaacaatagaagctttgagaaaataaacacaatggaattcagtgcagccatatgttgaagaagaatagtattctacaacatgggaaaatgtttgcaacacagtgagtgaaaaagtaaagcaatttttcaaagcagatagcatagagccttttggtaacaggatctatacagaaggaaaaaaagatgaaaagataacacatggataatgtggaaggtggttatctctgagggtgagcctgtgtattatagttttctttgctatgttttgtattttaacaatattctacaataaacactgcagaaatacttttctatctgaaaaattaatgaacaaaatggcagccattatctagtaaaaatccccccaacagttctccctacacgaaaatataattttggctgagtttgctccatccattgtaacacagatttctttttgcaaaaagcctatgtgaaaacttcagctaaaaaattttaataatattttaagaaagaagtcattagcattttcccaatgattctgtcaggtaagtacatgctcctttgggagaccctagtgacacagttcagtgggaaagtcatttaatatcttgaggcacaatctaagctaaaagttacagcacaacttcaagacggtggacactcaggcagggaaaaggaacctctgatgctcaggcatgtcaccaggagattggcaaatggcatcgctgtgctcataggagacacctggagcatccaaacatggtggtgaattaatgtttgccttccatccttctcagttcactcaacctgaaaagtgtttttcaccttttgaaatccgtctgatttaaagtcaatgaatagttttctgcactaatagcatgaaacatatgagaaccagtttatagcagtcacaaatttagtaattgctgaagtaaaagggctagaagagtaattgcagttaatatgagattaattgagctgcacgtggagcagagaagattgtgcaagacagtcttcagaatccttcttccaaatgcaaaatcataaaatgttggtatcacttaggcatccagttagtaacataaggctaacagagaatgtaggaggaagagactgcatttaatgaatgcctactatgtgccagatattgtatgtatacacgttaaatctttgtgacaaccctattaggtagaaattaatcaacccccaatttacaaatgaggacattgaaaaccagagaaatctacattcagagcctatattctttctactagattactttttttcaataacaagcatggatatataacagagagcttctcaaggtatgaattcttttttaaagcctcttcgagctttttataattattggtattccctttccctcacatgtcacagaaatactaatatgtaaactttttagtatttccaattcattttttagtaaaaattatgatgtttaaatgcatatattatcatttaaagtcacagagctatgctagtctctgtattctttatcaagtgctgttatttttagctcttaatgtagtataatagctttgtattttgttaaggtaaaggatttgcacttcatttaggtgagtctaggtagctaattatgtcaaagaatgaggttttgagtatactataggccgatattttcacacaaattaattcttggtctaaaataaaaggaaacctcttcagctattcaaaaggaagtcattgtccttactgactataaataataatagggctttatcttgtccatttggttattaaaaagaagatgaacttgtgttgaccaaagaactggtgaacttgatgtggtgaagctaatggaaatctccactcagatgtgagttatgtccaggtctaagttttttgcagcaatctcttgtacagaagatggaatcacgagggagagaatatttattaaaataaaaagcatcccatcacagagaggagttgagagattattgctatcttttctatcattgtaactccttttcaggacaaaatatgtgtgtatgaaagatagctaagtggtaactagagacagaaataaattaatgaagtggtgagttcaattgtgtctcctcaaattcatatgttgaaatcctaacctctaatacctcagaatgtggtcataaggaggtagtctttaaagtgataattaagttaaaatgaagtcactaaggtaggctctagtccaatatgactggtatccctataagaagaggagattagaacacagtcaatgcatgggcacagagaaaaggccatgtcctggtggcaggtgcctgtagtcccagctacttgggaggctgaggcagaagaatcgcttgaacccgagaggcagaagttgctgtgagccaacatcacaccacttcactccagcctaggcaacacagcgagaagaaaccaaccttgatcttggacttccagacttcagaacttcaacaaaataaatgtctgttgtttaagccagtggtccccaaccttttgtaaaccagggacctgtttcatggaagacaattttttcatggactgtggggggttggttttgggatgaaacttccacctcagatcatcaggcattagattctcataaagagcctagatccttcacatgcgcagttcacaatagggttcacttgcctatgagaatcgaatgctgtcagtcatctgacagaggtggagcttaggcagcagtgctcacctgacagctgctcaccttctgctatgcggcccagttcctaacaggcctaataacaggccgtggaccggtactgcaggattgcagacccctgctttaagctactcagtctatggtattttgttatgacagccctagcaaatgaatatataaatcttaaaatttgttggaaaagaatatgctcatgaggtcatacacactctattgtaccttttttctacttgcaaaatatcttttacctcaaattattttttgtaaacaaaactcttaaggctattatctactttttcagaccaacaaactaaaagaatgagagcttttgtggtaaaagggattggaatcaaaggtcaatgcccttggtctgggttttcaccctgacatcacctggaagtctctgtgctaggcactgggaagggaaaaaaataaaagaaaggtgcaaagaaaatgaaaagagactctgtcttcaagaagctcatagtctagagaaggagccagacacttggatactagaaaacaaagccaaaaatatatgaatgtggtataaccaaagagccacaggaacaataggcagaatataattaattttagctaaggatatacaaaagatatcatgagtgtcagttgaaatgagagactggagtcaactctaaacttccttgtcaatataaaatgctgtggtaacagccagaatgaaaactcagaatacttgatcagatatgctgtatataagcttttcctgtcattccagctataggatccccaaactgctggacaattcaatcaagcttcctattaaaccactgtgtataggtgttacgtgtgtgggtgtgtatctgtctgtcttagggttggtgtagagaagattcacttttttaattaaataattttgcagtataaagaatagattacattgactcagattcagtctaagcagtgaatgtaacctcagatgcaagctgcaaaatggaaggaatgtatctatcttattctccatcacaagctcagagactagcatgctatctgacccatagcacatgttcaacaaatatttgttgcctgaatgttgcatggatgagtaaacatattttctaccagatgagatgtaaagtttatagggagaaaacatcttgaaaattcggctctagaaatatcctaactcatacatgtccagtagctagatgtagtaacaggtttaatgggtttaacatgaaaagattttagttccaggcccttccacacttaatagttgcataccttatactgtgtcactaatccctcttagtctccatgtcattattggccaaatagagtcaatgatattaccacttctctacgtcagtgtattgttgtgaagatcaaataagatattgtgcataaaaaatcctcaacaacaaagcaagaggaatggcataaatgcagaatcaggtagtctctgtgttgcagagtcccactgtctctcctacagctgaaagttcaaagatatagcttgacttgtactttgcagaagggcacttaactctaaaagaagaaaataaactttgaaaaatgattaagaatggcgtgagtttagagaagttagaagtagaatgttcattgatgccttccctggtaagattctactttgaacagtaagtctattccattcatagaactagctaaaggtaatttgtttttcaataaatcctcatttccaatattctggatggcctctggcagaaaatgttatatagctataaaatgcaatctttcatcagggccattttaagacttttgcctgtcctagctacttaattttggaagctgcatcctatgttatatcaaaaattaaaatgtaaccacactctatatttaacataattaaaacacaactctagatgatttgaattatactggactggatgacatagtactacattaataaacatttattaattgtgattttatcattttcattcatatttttaagccagtaatttttttcaagtaattttttaggcccttggaaaactaatagctctcaggttctaggcttacagtggtaacagataaaacaattcctgtatttcataattgtctaattagttactttgtataattgcactggattttgaataaggagaaaaaggcctcccgcactatttcctagtaatctgtgtccacaagtctattttccctacctgctatgtttgcctaagactggtcatttgttacctgctagttccaattgatttcctttgcctttgcctcctttagccatgagtgcaaagaacagaccatacgatttataccagccatctagtaccaatcattagataacaagaccctttactgaaagcatttagagtaaaacaatactttaggtttacctttgctttcatttccttctttattacactaggttcaaagtgaggccaaaaatggtatcacaaggcctatttagacatccaagcaaagaatgccaagtcattctaaataaatcccccagctgcagtagaattttacacattttcaagtgcaagtttctaataacatttttgggcttgtttttccccttgtctgtttcagtcactgtctttatatataaggggaaatgagtcatattaaattatgctccagcaaatgtcctataaagacatatctaagccatcctgtttgctaataaaaagataagatttgtcctctgaaagaagcaaggttgaactatgccaaagagcttacagccagagttagacaaacccaaagtcattagctggtggggaaatctgaacttgtggcctttcttcaagtgggaggagtaggaagggagtagcagggacctgtcagccttggaaactcaagcttgtggcgagaggctgggaacttcctgtggttactaagaggctgcgataccttgcatagatgtcctgataattgttttctaaagttggcactgcctactggcttaccgttgctagtagaacattatcaaaaccggggtcttccagaattataggtctctaagacctacatagaagaaataaaggtcccttgacctgttgccaaatggtaccacaagaaaaaaaagcccttatttcaaactttgagctcaagttaacttccctactttgtaattccctgatggattccctgatttactcacctgattagattcaaagtcgcacagactaatttcaatattttccatggtaaatacaattaggtagactggtctgccacaaatcctaaagccaaatacacacggttgtgagatttttagattctcctgtttggggttctcaattcagtagcatgaattagtacttacatatagaaatggctaagagcatccagcataccaggtaaatgaggtgtaaggcaacacgagatggcacagaccaaggggttaggagaggccatgctccatctaaaggagggagctgctatcaggtatggctgagtgttgccatggagaaaactggtttgatatggccacataatctgatacttcaagataaatcagaaatttggattttggggtgaggtttttcacctttttttttttcacattgtgttagccaaactacatgtgtctacaaactgactgtaggccagagagacaacagttcgagacctagtatgaatcttgtttaattctctccctttgtcatgaagaaaagtgatagttccactgtcatttttgtgatagtactactgtcttttttttttttagacagagtcttgctctgtcacccaggctggagtgcagtggcactatcttggctcgccacaacctctgcctcccaggttcaggtgattctcctgcctcagcctcctgagtagctgggattacaggggtgcaccatcacactcggctacttttgtatttttggtagagacagggtttcaccatgttggccaggctggtctcgaactcctgaccccagatgatccactggcctcagcctctcaaagtgctgggattataggcgtgagccactgtgccgggctgtcatttttttcttctcattatttagccttagctgatctcaaagacttatgaaacagtaaagcagatgtcaatgtctccctctctaacacacaaacagacatatactttcttcattaaaaattacagaaaacatttaaaatatgaaggttcatcatgtggataaattatttcaacctcatagaacacaaaaagccctgttaggctatacatctatttcattcttcttctttactattgaattttaaaatgtgtgcacagtgaggtgacccttatatcaaagactacaaacagtgcttaaagatatgcagcacctttttaaagaaacacaccttcttataagcacagttaaaagggaaaaggttaaaggctacagtagattgttctattctgtgccaagattctgctccagctgcaactaaatagtggttctcaggcttaattaaataaagacccgtgtaaattctaactgtttactatgtgattagaacttctctgggcaaaaagctcatatttgatttccttgctgtctgcacttgcccaaaccctttacccaccaggtatgtactgaagctgtgtaaactcaacatttttcttttggaatcaagggtaagatataaaagtttatagaaacggtgagacccaattgtggaaaattcattttatgtaaatggaaaaaaagtattctatatattagaaccaatgttgtcatgatgaaatttctttgactaggccgggcatggtgactcacacctgtaatcacagcactttgggaggccaaggcgggtggatcacttgaggtcaggagtttgaaaccagtctgccaacatggtgaaacctcatctctactaaaactacaaaaatgtgctgggtgtggtggggcacacttgtaatcccagctattcgggaggctgaggcaggagaattgctcaaactcaggaggcagaggttgcagtgagcagagatcacgccattgcactccagcctgggcaacaacagcgaaactcgaaagaaggaaagaaaagaaagacagacagacagaatgaaagaaagaaaagaaagacaaacagacagacagaatgaaagaaagaaaagaaagaaagaggaaggaaggaaggaaggaaaaaaggaaggaagggagggaaggagggagggagggaaggagaaaagaaagaaagagaaagagaaagaaagaaagaaagaaagaaagaaagaaagaaagaaagaaagaaagagaaagaaagaaaagaaagaaagaaaatttctttcaataacattgagagcagtagtttttaacctttgtgaaaaatcatctagagtgcttgttaaaaatgcaaatacacagggcttgtccccagagatttactgtgactgtagggtgagacctttcaaatgtttgaacgcaggagattcaaagatcacatttggagaagcacctatctagagaaaaatcctacttccaagtttaacgttggagagctgttatctgaattcatctgggaaaaaaaagggtttattcttaataatggggaggtggcagaaattgcctctttaattttacccattctccaagtgtcaaaacgtaattgataattaagattatgttccctttaatatttttcaaatttagtttatttagataatgaataccacatgtccttcaataattttaaaattcagttaatttaaaaattgtataaatagattctgagatactaaacaaatatacagtcaaattttttatgttttcatttgaacattctggggaaaataagcatactttagaagcaagcacatataaatgcataattcagttaggttttttgttttaatttgtccttggcattgatgaaaaacaaattagctactctccttgggtgcctaccagaaataatagtaacaagttgagcttttttcctcctcagtaatatgttcctttgtagataagcacagtggagaggtaaaatgatgtataaaaagtttactgttttttttttgttttgttctaagatgtaaatgataggggaaggactgggagctatttcagaaatatttattccattgagacaatgaattttggtcattagaagaaagaatcatggactatcaaaatgaaacaaaaagacagcagatttatttctatagcaagtgtctgtacataaagagcaggcacacctcacaacattgtacatttattgtcttacaaaatgaactggggttgaggtagatgtagtaaggaaaaagctttaatgatgtgaggcaaatttttaagagaggagatgtttttatttttaaagaattcaataaatataatgatagtgttaaatgtttttgttgttttttctctcaaaactatttgaaccacttattaatctccagtctgtttcatcaatcttttatgatgtgttacaaggagtttctcaaatttaaacttcattacatcattttatagttataaaccctgaccactataattcttggtcctaactaggctatgaaaagaggaatgtattcattaggctagtacagtatgggaagcctgtagtttaaccaaggttaaaacaaataagatgccaaagttcacaattttaaataaactcaagaacctgaaaaagataatttaaaaacaacatagtgcatttctatagtttgtcattatttcatctcttatggaaatatgcagcaatgatggtctttttctatatctagaaaaaatacataagtgatttttaacagtaagaagttatttgtgtttggatttccttcgccacagcttccttaactagctcctgggtagaattcattaatttttattaacagggaaaacatttgttcccgtgacaatatttgcattgcctgaatgattttcacctctgccacaaggtgtactatcggctcatacatcacccgattacttggagagcagaaagaccctcagtcattagtgagtgaattaaagatgatcttaagagctattaatcacagtgacaaaagccttaatgtttctgtgaccctagtggagcctggggacccaaagggaagcagagggagagaaaatggaaacatatgttttctccaaaataacctaccttaggagaactgtcaaaaagagagtcacatcaaactaagaaattctgccagcaactggcctctggattatgtgtctatttatcttcttgtgaactcatatttccttttaaaatatatattttcttgctgtagacaattagagggccaaaactagtgtcttctgtatctttgatttcttaattccgtttatttagaacgacttgtgcttctgctaaactgcatttcttgaaaaaattcaacataaattgcattcagtctaataaccacataaatcagtataaaaacaagcagacaatagcagtaaagtgccattataaacattaattcaagcagatacaatattccaataatggaccaaaacggtaacattattaagcactacagtcggttacaaaacttgatcattcttcaatgtatctggctgtatttccctggatgtttacaagattataatggcatcaactccactgttaataacataggcacttgctggaatttcaattatctttcacaatatgttgacataaaaaacagactacaactggctatttctgaatatggtaagaagatccatatccccttatttgtatgcacgtctttgtttacatagctgaggaagaaatatcacattgtgcttatgttttgcaattggttctgagtctatgacgcaaaaaaaaaagggaaattctggctaaatcgcttttttttttttttttttttttgagacagagtttcgctcttgttgcccaggctggaatacaatggcgcaatctccgctcaccacaacctccgcctcccaggttcaagcgattcccctgcctcagcctcccaactagttagtattacgggcatgcgccaccacgcctggctaattttgtattttcattagagacggggtttctctgtgctggtcaggctggtctcaaactcccgacctcaggtgatctgcctgcttcagcctcccaaattgctgggataacaggtgtgaggcaccgtgcctggccctaaatggcttttctacacgtcagtttcttcaatacgatttggattagcaaaattaatggtgaaattatagttttctcttttgacattgatactatgttgccaaataaaaaatcctttttttcaatcacttttcagtgcctaatacagtaactaacacataattagggctcaaaaactatgtgttagactgactgaattggataaatattcaatgttatttatattgaaaaacaaatatgactctggattaagaatattaaaaatttttggaaattttttattctcaataagtttttatgttttgactaaagagtccaagtcaatacaactgaaaatacttgagcttgaacgacataacaggattattttattcattagaaaaaatatattttaagggtaattttctttctggaatcatagagaataaaagagaaaaaattatgaagaagttattttgctacggctaaaaataatttcagagtactttaaaagtctcgtgagtaaaataaaatcttttatgaaccaattagagttttgtatttgactttatgattcacacagctctgtaactagatttcattattttctccatctcccagataaggaaaccaaggcttacaatattaaactaatattctccactgtcataaatctaattgggggtggacaatgccagattttctggcttcaaatccagttaacttgccattgaactaagctgtgtcccaaatactttgaaatgcaaggaaaatgtattggttaactaaaatcaatctattaaattgggtctcagataaagcctagtttctatacaggaaggtttattgttaaacgtataggagacattcaaatattaacttttttgcaattattagtcataagaagagaaaagtttaaggaactcaaaccggatcccatgatagaatctccaagattagttaacataatattcacaaaagcaccttctttgataaccacagagattcaaattataactctctccatttaacagagtcaaactttttggaatgtaattcttggagacaaaaaccttctttatatatttccctcttgtccacctgtaacacccagcaaataggggtaaagctattcttgagttaaagaaaaatgaaaagcgtagatttatagagaaacgtgttttcatatggcatttttccttctctccaggtgctaaagggggtctcagagtagagttcaacacttagattagaactttttccttaaaagcaattagaaagttatttttgaatggctagaccagacttcctaaacttttagcagagcctaattgcaatgtcatatatagagtgacaagaaatgcataaaaatctcatcctcctaaaatgtatcaagggatgttttattattcaatggctccaggaaagtatacgacacaaccatgagccaaacactagttttagcactctacgtatattagctcatttaatcctcataatagcccatgaggtagatatgactctcatccccattttatatgtaaggaaattgaagcagtaatattaggaaaaagaataaatgatttttaaacagccataattcaaaccctgattgtctagctctagagcccacgcgctttatccctaaactatacaccttctcactctgggcttcacccagtaatagctgcccaattacaggataacaataagaacattttgcttgttttttttttaaagattattcaatcctaaatcataagtattcaagtttctgagtcaaaatttgacattcaaacattcttaattgcaccagcagaccctgagacaatggttcaagagtccgtagtttatttcagaggtggtcccaggaaacgtgtgttaagggagtatgcagtgagacagagaagggccagaagtcaacaaagggtgtgctatcaatcgagttagcactagggaactctagatcagcacagctgaggtgagggatctggggttttatccaccgattcccatcagtcatttgttgagagcttatcccaggggatgtaattcctcacacttctgacctgccccatgctctggccgggcagtctcaggcaaagcatttggaagtcacgtgaatatgcacagaaatggtgaagggatatggatggggtactggctggccatagagatggccacagccagcacgtgaagaaatgtttcaggtactatcgggttttcttgttccaatatgcagtgttcgatccaatcatttaaaaccatgtgtgtttggcaaataaaacaactttttattaatcttctgtccatagtatttattaattcattattttcaaccaaaatttactgtaattgtgaatctaggttgggtgctgggggcaaagattaaaacataaattaaaaacaatctcaagcaagacctacaaattactacccacaaaagcaaagactgataaaacaggctacattaaaataagaccttctgttcatttagagatagcataaggaaagaaaagacaagctaggaaagatatttaaaaatatatataattaactaaggattagtatccagaatattaatattattaatattatttaatattaatatagttaatatattattaactaaagattagtatccagaatatattagtatccagaatacttctaaaataaaacagactacattaaaataagaccttctgttcatttagagatagcataaggaaagaaaatacaaactaggaaagatatttaaaaatatacataattaactaaggattagtatccagaatattaatattattaatattatttaatattaatatagttaatatattattaactaaatattagtatccagaatatattagtatccagaatacttctaaaataaataagactaaaacaaaaactcaatgttaaaataggccatagacataaacaggatttcactaaataggaaacacaaaaggtccacaaacatgtgaaatcaaatgcaaattaaggctgtaatgagatagtattttacatctcctagatgggcaaatagggtaataccaagtggtataaacatgtgaagaatgcagaaactcttgcacattgctgatgtgtgtgtaaattggcacaattacttccaaacaatattgtactatcttgtgctatatccctgacatgccaattccagtcttgtacgtacatactagaagacatgtttgaggctgttcttgtccacattccttatatgaaaaactgcaaacccaaaagacacatccacaagaaaatgaataaataaacggtggtatagtcacaaaatgaaatattatacaacagtgaaaatgaataacatgggtgaatcttggaaacaaaatattgcatgtagaaaagcaagacccaggaaaaaatttctaactcaaaaacaagcaaagccaaacaatatattgtttggtaatacatacataagcaataaaaccattttttaaagtagaagaatgattaaagttcagaggagggcttacttctagagtaaggcagaagaatgaaatagggaaaatgcacatagagagataaaataatttggttgtgttccacttcctgagttaggtagtgagttcacaagtgttcattttatttttatattccattacttctacatatatcatatatgttatgttttatatgtgtatatatatattcttttcaatatatcaagaattgtgtaataaaataataataattaagaaaattttgcttggctgtacacagctcacaatcctgtttggaagccttcttgttgaaatgcgaaatgctttaatagacagagaatcaaaacagaggggttgtggagcccatgctggggccaaggaaggtttcatggaggaagccttgaaagatgagtaaaatttgccaagtggaggtccaagaaaagcattccaggcaggagaaacccaatgagcaagggattgaaggaagatggaagcctgttggcatgtaaggtgctagaagggttggggatggggtgggaggagggagtggggttggggtgggggaagacaacactctaaatagtttgcaattgagtgaattgacaaggtttggattattttatgtcaagttacaattgtcatacttgtaatgagacctgttatcattgcttatctttttagggataaaccatatgccctccaaagcttctgaaggaaacaacttctctttccccttcatattggtgatgttgggagggggagatgagaaattgaacacaactagccccttctctccaccagtttagacagctcaccccagacccaagagtcaagtaatcacctctggatatgaagagatattcatgttgggtggtctaccaaggattaaatgccaggatcattgagaaaatttcatctcattaaaggcacagaggccagctgatcctcctatctgcagagctgacaataccttaggtgcacaattaatttcccaaatagtttaaataatctagaggagcagaaactgcactgacatgaggaatacagataacaatgagtctaataatcctggacattgctctgggcagcctgggtagacacacgtgtagccatttcccaagctggctgatgtgacagctcagcctgagctgagtggacagacagagtccatggccctccaggagaaattcaagccactggtgccttggacagaaccttcatctctaaagcagcgcaaccaagatattcacgtttctgtgctgtatgacaaagattttgtaccaaatgaaaaatgttacaataataataatttctatcaccaaacaatactttgagtgtatatagcaacttaactatttgaatcatacccatttttaaaactctgtaccagtacaagcctgttagcacattcactgacatatactagtaagcatatgtccttttcaccaaacccaagaattctatctttatcaaaaaatagaaagactataggagacagaaaaatgttcattttacatttccttagcaaatctgagatgcacaacatctcaaatctcagataacaccatggtattacgtgcatgtagaaagactttagttgctacaatggacttgtctgcaattatgtcaaatatgcataaaatttttggcagatgggaatatcagaaataaaagatgctttttttagctatgttacacttcttcttctcttcttttttttttttttttaaaaaagggggggtcttgctctgtcacccaggctggagtgcagtggtgcaatctcagtgcactgcaacctccacctctcgggatcaagtgattctcctgccccagcctcctgagtagctgggattacaggcacccaccaccacgcctggctaatgttttgttttgttttgttatgttttgttttgttttgttttgttttgagatggagtctctctctgttgcccaggccggagtgcagtggcacaatctcagctcattgcaacatccacctcacaggtttaagcaattttcctacctcagcctcctgagtagctgggattacaggcacatgccaccacacccagctaatttttgtatttttagtagagacagggtttcaccattttggccaggctggtctcagactcctgacctcaggtgatccacccacctcagcctccaaaagtgctgggattacaggcatgagccaccatatccagccaatttttgtatttttagtagagacggggtttcaccatgttgtccaggctggtctcgaactcctgacctcagatgatctgcctacctcagtctcccaaagtgctgggatcagggtgtaagccaccttgcccaggcttgtgttacacttcttatgagtaacttctatatgccattaaagtatgaattagagagttttaatagtctgcttttattttctagtaagcacagaaaacataagaggttgctagtaacaagataaaaatatccatagtgactaggcaggtaagtatcccaattaggtgggtatactaatgtaatctcttccatgccaggaaaggaagcttcagatgtttcatgtcaaagaatcatatattaaggagattgtagagacaatcaccactaacttttagtggaagaataaagacatcaaaagaggcaaacaggcaaaacaaacaaataagaagagttttctaaaagtgaggctattgcagatgaaggcacagaaacagtttttgtggtctcttttctactactggactcaaggtgccccataactttggaaacaccaccatcgatgaggttttcacatttttttttatctatagtttttgaccctgaatacagaattggtcaaatggagtagtatctttatggccctaatacattgctttgtattacagtcatttgaatggaggtctgtattcttttcaacacttccacagaacctagtccagtgtctaacattcagtaggtgctcagtaactgtctgctgaatttcagtgaataaaccccttgaaagaggagttattccaccacagcatcaaaaaaaaaattcacaatgagtttataaagattatgttttctactcataatatttgaaagtatctaccagaactgggatttctctccttccaatctgctttgaaatttcttggtatcccatggaaaagaatatattgctaatggaaattccagtggggtctcttccctgtgagcaggctccttgactctcttccaaatgccaccatcaaagattccattcatgcccctcacattaggtcccttcattaccctcactcagtcataaaatatttatggtgtaactattgtggtgtttaaggcgctgcactactctctgtggggggaagggaagggggaagaaatgtagccccaatctacccccagacctattgtgacctatgaaataggtttgcattaaatacccatgtttatattgtaatatctttgcccatcttaggaaccaatcacagtgttaagaagcagggaaacaaaacaaaaaacagaatgccttctctatctgccctcaaatagttaaggctttaacctgtcttctgttcccatcattccatgaaaagcccttctctgactttgccaacagcctccatcttatccaatcccatggcatttattttattcttcattatcctgtttgaacaggctcatctcctgtcaatactcttccgctgtttcccactgacagtgctgggtctgatgcttgctgtgctcatctgaaaacacagcagaggtcagtttgggctttcattttagcaatcgctccctgaggagcagagggaaaagtccagctactctgaacaactgcttcagttctctctgaggacagaagaggactctcagcactagacagttagctctggctcctccactctcttgaggtctgtgagcccttttcacatcaaatcccactaaatagagaatttcttataatccccatattttcatccccaaactcactctttcataagtttctcgtaactgcatctcagggctctttcttcgtactgatagcagataactttggaaacatatttaagttatcctttgccctgtctttcctaccgtctacttccaaatctttttcagagttcctgaagtatcattttgatcttgttgcccttactcccaaatcttatgaggactctcagttctcacatcaaggaagatacctgaaagcctttaccagatgtgtcacaacatagcccatccttctcgtcacagatttctagacactccccatcaaattttcatgagcaacactgatatggtttggctgtgtccccacccaaatctccacttgaattctatctcccagaattcccacgcattgtccgagaaacccatggggaggtaattgaatcatgggggctggtccttcccgtgttattctcgtgatagtgaataagtctcatgagatctgatgggtttatcaggggtttccgtttttgcctcttcctcattttctcttgctgccaccatgtaagaagtgcctttcaccccccgccatgattctgaggtctccccagtcatgtggaactgtaagctcaattaaacctttttttcttcccagtctcgggtatgtctttatcagcagcatgaaaacaagtaaattggtaccagtagagtggggtgttgctgaaaagatacccgatgactttggaactgggtaacaggcagagattggaacagtttggagggctcagaagaagacaggacaatgtgggaaagcttggaacctcttagagacttgttgaatggctttgataaaaatgctgatagtgatatgaacagtaagatccagactgaggtggtctcagatggagatgaggaacttgttggaaactggagcaaaggtgactcttactatgttttagcaaagagactggaggcattttgcccctgccctagagatctgtggaactttgaacttgagagagatgatttagggtatctggcagaagaaatttctaagcagaaaagcattcaagaggtgacttgggtactgttaaaagcattccattttaaaaggtaaacagagcataaaagttcagaaaatttgcagcctgatgatgcagtagaaaagaaaaacccattttttgaggagaaactgaagccaactgcagaaatttgcataagtaggaagaccatggggaaaatgtaaccaggccatgtcagagaccttcatggcagcccctcccatcacaggcctggaggctcaggaggaaaaagtggttttgtgggtgggcccagggtccccatgctgtttgtagtctaggaatttggtgccctgtgtccaagccactccagccatggctgaaaggaacaaacatagagcttgggctgtggcttcagagggtggaagccccaaatcttggcagcttccaagtggcattgagcctgtgagtacacagaagttacgaattgaggtttgggaacctctgcctagattttagaagacgtatggaaatgcctggatgcccaggcaaaagtttgctgcagggacggggccctcatggagaacctctgccagggcagtgcagtagggaaatgtggggtcacagcccccacacagagtccctaccgggacactttctagtggagctgtgagaaggggaccaccatcctccagaccccagaatggtagatccaccgacagcttgccctgtgcacctggaaaagctgcagacaatcagtgccagcccataaaagcagtcaagagagaggctctaccctgcaaagccacaggggcagagctgcccaagaccatgggaaccccctcttgcatcagtgtaacctggatgtgagacctggattcaaaggagatcattttggagctttaaatttgactaccccactggattttggacttgcatgggccctgtaacccctttgttttggccagtttctcccatttggaatggctgtatttacctaatacctgtacccccattgtagctaggaagcaactaggttgtttttgattttacaggctcataggtggaagggagttgccttgtttcagatgagactttggactgtggacttttgagttaatgctgaaattagttaagacattgggggaccattgagaaggcatgattggttttgaaatgtgaggacatgagatttggaggggccatgggtggaatgatatggtttggctgtgtccccacccaactctcaacttgaattgtatctcttagaattcccacgtgttgtgggagggaaccagggggaggtaattgaatcatgggggccagtctttcccttgctactctcatgatagtgactatgtctcacgagatctgatgggtttatcaggagtttccgcttttgcttcttcctcattttctcttgccacttgccctgccatgattctgaggcttccccagccatgtggaactgtaagtccaattaaacctttttttcttcctagtctcagatatgtctttatcagcagcataaaaccgaactaatacagacactctccacgctacacaaataagcctggtcttccacagagccaccttgccctgagtttacatcatagaacttgctaagctaccctccctttcctgataattaagtgggtagtagttatgtgtgttgtgcgttatctttatctacctttattatcttaaatcccacacctgcacccactgtgaggtcactattactgttttttcagttaaggaaataaagactgagagagcttctcatgatcatatacctggtgtcagaaccaagatttgaacccaagtctgcctgattcaaaagcccatgctcctaatgactatgcagtgctactgccctcatccctatcaggatggcttgttcagggggtgcaccaagctttaggcactccctgcacatgccattgtggttcactaagtggaaaattaattaacagttactgaattttcagttatttttttcagtataattttgtcaacaaataaatacttacaggtctaagaattttttatgttatgaaaagggatcctcattgtaaaatattgaaatccaactccttcattttatctacaatctagaagattctacattagttcaagtcgtcctcatccttgagatgtaaaagaaattgctctgaaccacccaatttcttgaccccttgtgaagatgtctacaattcccaagggtggaagaattaagtcttattggtgccctctgccacccatgccctagagttctcctgctccacctccatcttctcctataaaaatgcaccttctcattcagtagctagaaggtggccaggcaaagcaggcattttgtaaattttagttgactgggggagggaacagatgaataatgcaggatgtgaggctttgtaggttaagatcacaagaagaggtggatggttatctactatctccccccaccaagaacttttctgactctgagtttgagatgtccaaagaaaggcagaatcatacctttctcattgattcttatgtttacaaagtacctttataaagcgtctactgtgttccaggtaccatgttaatttctagaagtaaaaatgtcaactctgtcactgtcttcaaggaatccatagtgggaagcagagcacacaaacagatgtttacagcacaacatgatgagtggtttattacacacaaagtattcaggaaacaactaagaggaagaaaaaccatctccacctggaaagactggaaaggctacacaccagagctcaaatttgaaatacatctcgaacaaggatttggccatgccaagacagttgagtggaaggaagtacattctaggcaaagaaaaagcacaaatgtgacctacaaatgaaagattggtgagtaactctgcatagctggaatataggcataaaagagaaggcaagaaatgaagctgaaatggtaagtcagaagtgtattatttaaacccttgtttgtggtgctaaatggctgggcaactaggagtcatggtgtgatcagatctgtagtttggaaattcaactggaaactgctatggatgagagctaggagaggggagaaattagaagctattatagtgatgatggcaaccaatggtgaggtgatctttaggtcatcactggaacctgacctatagtagacattcaaaaaatattttcatgtaattgaatttgtctcatgagctccttgatctaatatactgagcaactagccttgctaccatatcttgtaaaatgccactcgtgttatacgttgtgggaatgcttaggtgcctgaccaggattttaagaagatatagaactaacttagtatttatttataggtcgcccatcacatgctaagcatcttctatacattatctcatttgtgccacacaacaatccttcaagacagtgttttcaccattttacacaggagtaaaatgatgttcagagtaactaataaacaaatttatccaactaggggtaaagccagatttttaattcagtgtacatctaacttcaaaggcacctgtaaatttgggatattatggcaagagaggtactggtaaagccacattatctttaatcaaatattttagaatagcatccacaggagtgtgcatgtgagacccctggcctgggaagaggagtttgcatcctgatttcctttttcactgcatatggcagcaaaccataatgagtcagacattgtcataacacattgcataattccaatgaagcattcacatctcaactactcttgattatttccaattccgtaataaatgaaagagatcaactgttcggtggtttgaggagggtggaaaatcatttaattcttaagtaccattaaatatttaatactattataaggaggtaatgtcactttccataatacatttggcttcaggtacactggaatccagattttgacacctccataccatgataaatttttgaccctgaaattttatttgaaatcacgactccaaaatctcctgtagccaatctaccaggagtagtatctgtcaacagagagaacatcatataaagaccttaacattttgaaagcaaagccaaatgaagctcaatcacgaaaggtcttttctttctttaaggtgagagatggagcacaaatgaagcataccatggtaaataggaactgtgctcacttgcagtcatgcactatagccattaagccttaaggtcttaaggtactaagcaatgcatatgataaatttctcaaaaacatcccagccataacatagttcttgctgattgctcatttacccataatgcatgctgtcatagcaaagcctgacaaatgacagagaaagctcaggttattttttacactgactgccaagcccctcacctcagattattcatttattagggcaatcactgaggtctgggtacttaatattgttttcaccaaatatgaaaatgatctacttgcctattctttagttcctcctagggcaagccatttatcatcagctcaggataaatgactgcttcattatagctataatttatgaggtgttagaagtaaagagccacgcctagagacttaaagctttaatatggattaaaataagataatcaatcaagctaatacaaattttccctcagcattatttcttgttttgaaatagcttaataatttggtgaggtggcggtaagctatgttgaatatcccattatccaactacatgcatgtatgtctgagacaatacgtaaagaaatataggatgtgataccatcggaaaaaaagaaatacaatgaaaccatcagctgtaattggctgaaatcctcactttccttaatggtgtcaaactggagaccaaagaattacaaagcaggtgtaaacttgggtagcatattccctctaattctttttcctctgtaagaatattgtagaaagattgctgctgttttacttttccttattctctctacaacaaagaaacactggggagaaaagttatgtcccaataacatgtcaacaattttgctttcttttatgtctgaaggtttcacaactcataatttggacaagagcagcttcttactctgtctagggaataaagaatatttccctctaaaatggcattacggactttaaagaaattttttctggtttgcatctcaattttatagttattaggctatgccagaacaaatattatttctgaaatatgtgtcatgctcaagacactaacgtaaacctatttggccacttgagtgaaaagctttgaagactgtacgggaaattcacgatttagtactttaaacacacagcaccaggaagaaaatcaccacaagaattaacaaatcagcagtctaaagccaaagactccaaggtgctaattaaaaaagcttccaaaagttcttgttattttttttaaggccatgttccttgcaggtgagacaaataggcccctgctgcctccaagcaaatcttgaaggaaacttccagcaaggcctggtgactggaaactactcagccttgaaattaacatccctaagaaaaaccttttccactccctctagacaacagcagcttacatcttcaggacaaaacgaaaaaaaaaaaatgatgacaaaaaagaggccagagaagacagttggagtagtcacgctgtgttctcttgaagggagccttcattctttacctcagagagagagcgtgaaaacacacagatcctgacaatggatttagtcaacgtggccaatctccctacttccttacacgtacataccactgagtttaccttaaaaaagtaaaagcagaaattttcacaaaagctgtgcatcaggagctgttattacaaatgaggccaaggctctgcataagaagaaaaggatctttcacaagttcataatgggaaccgaatgcaaaagccatataattataatccagaatatggcatcctatgatataaaatatttccacttagcttaactgttttccattcaatattatttccagcaataaaagcctctggaatatcactcaaactggttcaagttaaattccaatctagatctttgttagctaaaggacatttttttaatccagtcatctttctccaccctacacataattcaacaacagcccttcaacagggataaaacaatttaagctctgaagttgttctatgcatgtgtgtgtgagattttcatgccctatgtatttggactgaaaatacttctctctgtctctctctcatttagactttatttaagatggtgaaaaaaaaaaaagcaaaatgtgatattcacaagtgcgcagcatcttatttcccatttaaaaagtattctgtaaagaaaagtcttatacataaaaagaactctacttgtaaaaatgaataggaatatgtactatgaaaatattaaccatcttagctgtgaagaggttccagtggttataaagagaagggaaagtagatagaaagctctggcttggctgttgggtttttggtttgcttgttacatgtttacctgtttgtttaacactacatatatctccaggtactccaccatccatgtcatcaactgtggaaaaatgtcccattctttcttatgcctatttcttagaagttccagatagtgagggaaaatattctaggtctcaatgagcaatgttataaattatattttgtatgctacactttagagagatgtctttagtgtattataccattgatgattcttgtgatttttatttctatgtaaaatacagtttacacaaaatttctatcgcttagtgagacattcataattacatatgaataagaattacagaagacattaaaatgttttcataatagatgtggaaaaaagctatcctgcgagcatgtttaaaatagacatggtttgccttaaactgaggcataaagccccactgctaactgataatttaaagcacaaagatggggaactgtttttctccttacttctgcttgtctgtttatctgatgaaatgttcaaataattcctcttctcaaaatactagtctctagtaatgcttttttatatatgtgatccctcaaggtagtccttcccaaataatagccatcgatttttaaaaaaactttgaatggatcaaatcttccaatagacatcaatcaatattctcagatgctttggtaagccgggtcatcactactcacggccgatgcccaactacagcttggtagactggcagagcaaagctgatttctttgaaaggccaagtgatagaggtcaagcttgagactgcttaggaaacacacgcctttcccttatttgtaggacaaaaatgattgttaaaaatttttaaattaaataagttaacattttaaaaattaaataagttaacatatgggaaatccattggtaaactgaaatgcactacataaatctatgatggatcaatgttgatattattatttctgttaattatattatgcatcttccttcatgagtcagtcagaatttagaagatatttacattgtattggaatttgttgattcagttctaggaatacaaactcagcatctaccacgtaaaggaacacagtactagacacaaaggggatgtgtatcatggatgtcaagtccctgctttctagtagctcacagtttcaaacaactaaaatgcagttctgcgccggcttcagaggggccaggtttcccacaaggcctggaattgaccaatagctgagcacacatacttgccatatatttcttgaatgagtgagtgaatgaatgaatacctaatttggctaaccctgggtatcatccttattttcatcatctactaaaaattagagttgaatatttctatttttctgtaaggtttgaaaataacaaaaaattattttcaataagctaggcatgagaaaaagcaatggcagctacatatttttccatagctttcattccctaatcacttcttgcatagttatacacagaactttaactgctggctttttaagggaaatttctcaaatgcaaacaaatatatttcaccaaataaaatccttacatgaatggaatgggaaatagtaacttagatgtaaactgctaagttaccaattagcttcttaaaacaattgaaagtcacagagagccctcaatatacagaggtggttaattaattaacattagatgtgattaataatgagtctcatttaatagcaaatatctgcctgcaatggctgcatgacagaacaaaaagccttcagagagcaagcaactatatttatcctgattgtgtttgggattttaacatgttttgtgcaggctgacaaatggcctattaattatctaatgttgtctgacaacaacagcttgataaagatgtatgtttttgaatcgctggatggaaactgctggagaagagccccagaggggccttgctgtcctaaaactgggctcctagccacaatgacagtcaagacaaagccctatctcccgccacagccttcgcagataaaatatggcttggcattagggacatttttttctttcagaaaactgcttctgcaatatctgattaggaaaaggaggagtacttctttactaaattggggttaaggcataatcaatatcatatatggagtgtctggcctattctgcataaacacgggcacttcatattattaaggagtctataatgccgaggaagcatatggcaggacactgcagctgtctctattctttttatttagaagtttatcttccaacctgtttgacagctgctcctaagtggtttcacagtgccaaactatttttatgattgtttgatgttttattctcccatttcagttaatgagataggatcccacaatggccataattcagggctgtcagaactaaaaagcatgcttgtggcaagagagcctgatggtaaataaggctaaaagcaatggataataaaaaaaaaactctgttatcagagtcgcctttgcaatcaaaacttgttggggtcagagccttcctttctttgtgtggcttctggatattcccagccctgtgcaaggtccctgtccaccctcctccatcacccatttcgattctacaaacaagtcctcatttctttggaaaggctcatgaggaataatattaactaagaaatgttagaaggtcttaaagatatcgagtgctatattctaattaaagggcttgtgcatcatttacagtgccaagcgagtaatttgtcatacactgttacagagaaattgttcaacaaataacctttacaagagtcttgagaacagcttcataattgaaatccctaatggttttgctgggaacttttattaaggtttggaggatttttttcttttcctctccctgaagagtttttagaaacttatgatggtaatgtagcaactttctttcaggaaaaaaaaaaaaaaaaaaagccctttcttagttatatttacaaatgccgtaagtattcacaaggccatttctgctaagaatcaaaagtacagtgttttccagaagaaaatgtgaggtttgctttgtgtcttttattttgtttttattattcctaatggagaaagttttaagacagatgaagatacctacctttagaattatttttatcttacactaaagttcatgatctttattttggtgtaacactatccttgaaaatgtaatttaaaaaaattcaaagtcactactagattgagtctgtcacataaattattattcaaaagtttaaaaactgaaaagtgaccactttctcaaacaatatttctcttcttattacacatttaaaataatggtccttcacaggcagaaaatagcatggcaaaaaactcaaataataataagtcccataactaattataaagcctgacacgcctcatacagaaacactccctgatgactaccaaagattggctgctttataaatatttaatgcttgccagtaaccccaatttttatctcacatctaagactaaaccatttgtctcctcttacaatcagccatgtctatgtagtgtcatcatgtctgagcaagtttgacttactacgtgttttccaggatataaaattcaggacatgacacatcatcatgtgaatgaaacaattacacaatctaagaaggatggggaaaaaaagaattcaaataggctaagtgtcattataaggttagctccagagaactcaagtcagaaaaactgaacatcagaaaatgatagataggtatggatctgttgtgaactactgaagatgcagctcttataatactcttctgtgaccctcaattcttttctgcaaccaaataaagttatatgaagaaagtgcacaccctaatttagggatatttatatccatataaaataaagtgtatctccgcgtttatactgcgccacctttggggaaaagtgtagtagtctctaatcagggctggtgatggcacctgaatcaagagaaaaactttgacagttgaacaagtggttcctattaaagggatcatagaagttaaaaggtaaagattactactctctgattgatgggttatcacctcctttggattatcctataaaccccattatttctatgagaatgactctcataattccggaatattttacaggtgagtacagccacctcaaaaactggaaacatgtttcacaacttccagaacagtaaacatgtgaacaaacccaactacaagccatgcatggagcaaatacctttgagagagctcatataacctgccagtgctcaatgcacagccccttccaccagtcttatatatgaaactcaggatcctatgtccagagctctgagacaccagccacttccaaaccaccattggaattggtttggtttgtccatcatgaatgttgctcttattggtttgacgtggctgctgtttgtgaatgtagttcttatgtgtttgctggtagaaagcttttgagcctagtccaagccagaggctgcgaactaggcagtctttggcctgcaaaagttatcatttcattatcagtgtttcttttccttttaaaaaaattattttacttgtcaacacttaaaagtgagaggatttttacattaatttaaaaaatcagatttccaccttcttggaaatttatatggtctggcaacatgggatccacattctgggaagaaaaaaaaattctagagccctaaagacatgatatccattcttgggttccctgtgacccaccactacatgagtcttttccttcattcacacctgggtcctgctcttgcttttaaataacacccaaattctagtccacacctgctccttgcattgtacaatatagagatggggggatttcagtgaaagtgatcattgtcacgaaattcatttgcagcagaagtgggtttagattccagaccccctagttgacaaatcaaggcaattaatcattatatattcaccaagtcagtaacagtatattttcaaggggcttggaacctagtgggaaataagggatgcatttgtaaacaacaataatatggtaaatggctgaaaagttactcttgccatgagaaaagaaaatataaagtgccatggactgtcagcatccatgtcaactgggagctggttgcaaatgcagaattccaaacccaccacggacctgctgaatcagagtctgcattttaacaagcccactccacgattcaaattccctgtcctaggggagggactttgcaccattccagaggtgctttccatcatcccctccgtaaaggtgggaccacatagctgcatggttatctgcgacccctgtacccaccataatactacgcactgaaagtttaaccagtattagtaataaacaaactactaaattaggattcttccctccacccataggaggaagaacacacacatgttctcgccgggtgtgcttttctaatgtgaaaaccaaggactgaaaccagaagaaccactggaagcaggcaggaggccctgatgtgaggcaggtcagtggcaggatgtataagaggaaagtacatccagggagctgggctggctgccgtctcagcagccagacccagggccagttgttactcattgccatccaatccctccaacctcatcgttctccagctctgttcacagctctaccactgttctccacagctaaaaccagctcccctgctggggccctgccatgtgtttgacagtcccttccaagcaccccttccccgagcagaagggccagaatcttcactaattaatatagcccatggatggggcagcgcttaggagaggctactcattgttgagataccctagatgatttttttcttttaatttaggaactcacagggcttaattttgagctacaattgtttggtcgggctctctgttcagaaactcggccaaaggattaagcattagctccaggagtgcagataaaatgattaagtaaattagtatagtacttaaagggagaagagacatcctttagaatatataggggaagagaggacagtcacctaaaaattattcactcttcttatctgatcatatcaggccaacttttatgtgtgctaagaaacagaacatacataaaagacaaatagaagaaaaaaatgaaccacaatcttcttttaggctccataactgtattttgaggataaaattgagactatcatcttaaatggaatctctgatattcatgtttgaataatagatattcccaattattactaaaaatgtcacctctgaaatatgagggccacatacctgtaatgccatcagtcttccaggccctcactgaggatttgggtttctttttttgttttgttttcccttatcttttcttccccttggaataggagcaaatgtgtctgtattgttcaaaagcatacacgaaaatgtgatgtaacctaagctaggttttcaggtgttcctttttctaagcacgaggaaagaaaatagatgacaccacaggtttaatactaattgatttattacctgcctaagcaaatcccaagctgcgcaatggcaggcttggacttaaagcaaatgatttacaagataatgtttgactctgggaaagggtaatcagatccagatacaatggatgataggataattgagaagaaataaaagaggataaattgccatgtgctaatgagtttacaggccttaatgggaaggacatcagttttaacactcaggttatgagctaggagcaagtctttttcttttccacccccgccttcaactgctaaagatgtagtgctgaaacaaaccaagattaatggtatcccactcatttacttaaccattctttacacctcagaaagcttcctgcattaagcatatatagctgtggtgtcctgtattaaacacagagagctgtggtgcttattttttaaaaccaactttattccaagcagttcctgtcagcagatgccacttatccaacagcgccgagatataaatgtttttggctgggccacttgagcaacaactcttctgctcccgagtccctgggggccttggagcctgatgagttgatgccgttatctgcaagccttttggcctaacggagaatattccgaaccatttatgcaacctgggtgcactcacatttagaaatggttgcctgagcagcaatcatgtcttgcctcatgattcatttttatatctcactcacccgccatcccacatcaccagcgaggactggtgacactttattggtattttttgattactgctatagccatctaaatttttcacaggatgggggcctctggtccaaatgtagccgcacactggactaagggtagaggctacaaagaaataaaggggcagaggccagcagggcgattaggaagtaatgtagagcagaggcacttcctaggaaacagagaacctattcccttgtaatgtttctaccaaatgaagtttaatatgatgaatcatggtgcagctccagcatgttcacaccttgcaaaaaagcagctcaagcgcagcatttaaacatgtctgaatgatgactcgattcccttacacaaaagccgaaggagtacatatccaaaatggctatttctacctgtattgggaaggttgttttagagcgtttcccattttcacatgtgcttgggaaatccaagtgctcatttcatgcttactgatgtaatcctgatcaaatagtactcttattcacaaaagctgatctgatgttatagttggatcctaaaccgtaaacctcaaacataattattttcttgacctggtgttttgtgcagtgaggttctagggattgatttgaaatttacaacctgactatttctgagtcaagcagttactatgaaactataagcaatattatttacccactccatacatgagatttttaggaacatctgggttgtttcaagtttctgacaatagtaaaacttcactggttcatgttaatttggagaaatcactaaaacaatattaagtttgtcacactttctttacactttaccaagtgtttttacctgaaaagttgaccagataatataggaagtttgcttttagttttcaattattactgaaaatatctgcagtaatgcaggacaatttgctcagcctaagctgtagctaagattcattttaatttaaatgataactgtttatatagaagtagatgcttccaacaaaatcatcaggcttgtattcccccttccccctcaacctgtcccctgctccaaatcctacatttgcttatctttcaacttgatttactaatactttacatagcaaacctgtttcaggtgtataagggtcacctgcagttcaagccaggcccattttggttggattcttatagtttctgaattaggcctgtgatgctctaccctatactacttgtgcaaaagcatctggtgctaggcagtggagaagcacccgagactggcgttagtatacaccccgaaagactaaagttaatcttcttaactctttaggctgctgtaatccttttccaaaatgtttaagaataggttttccctgtggtaaagaagtaagagcccaatttctcaggcagataaactgagtcttgagagttgttttgtggcttctgaaggtcacaaaaggagcagaaaagctgggaaccaggcctgggatctcagactcccacgtcctcactgggaacactagacaatactgacaccctccatgaactgaatccaaaaattgtaaaagataagttgtttccttatattgttcaaagaggaaaaaaaagaatagctttcccacagagagcaaacaaatagtgaatgggccctctcttcatcctatagaactctatgtgagaatatttttttttcttatgtgaattcttaaaaagtcagtttggattgctgcctaacttacagaacatttcagaacagacctattttttgtctaaacaatagaagtattgggtcatagaatttagagttggaaaagaccttagagatcatagaattcagcaccctcattttacaaactgagaatcagaaagattagatggcatggacatgtttacaagtcatttataacagaggcaattaaatacatttcaaggaaaataaatctatttgtatgaatgttctaattattctaggaaaaaagtacaagaatacgttatctgaaacacatttattattttacatggcaagacttggcttcttcccttcagaacaaatctcgctgagagtggattcagtctccttgcaagaaattggacaagtaccaacaaggcccccattagccctgtccattacaggttccatagactcaggttttgtcaagagtgcaaagaggaaatggcagtgtgatagcaaagcatggtgccacacaaggattaaataagaaaagggccaaaaacatccacaaaggggaaccaattaatttacgggagagtccaagatatatgggagatcatgttccagattcaggtatcagttggccagggcctttttggaaaataatccttatcttttatttggtgccctccttgccttcctgttccttctcagccagtaaatctgcagccttaaacaccagctcctagagaaaaccaatgttttctttttttttctaaaacagacaagcagttgtatcaaggatcttctcccaagaacagggtgtattgatattggacacaacagttcagttctgctagagttgaatcttccacttgcgccacccctactctcttattttcgtacttcatctattttctaaattagttgaaagattagctgtaaaatgatcagcttctaaatgattgaagctgtggtcttatctgactcatcatctgggacagaaaccatggtgcagatggatgttcaaacagaaagacatttttacataaaaaagttgtcaacaaacaccaggctagtgttattgcccagaggaagctgacatcatggcaaagttttgaagaactctagaattttaggactgcaaagacatctgtgcctccgcttatacagaatctttatttttcaaatatgaaaaatttaagttttcagagatttggtgaaggtcatttagccaataaatagcaatgaaagacccaggcttcttggttcccactgtaccacatttccagcagttctgaaccagctcacacaggtctaaaaaaacaacaatagaacaacacaaactattgctctccatttttgaaaaaataaatttttggaagtggtaagttatagacgcatataagttaatcacagctgcctgtgtgtgcaaaagtagcagtagcaaaacacctagctgataaagtagttctttaacctttatagaaagcatgatttaaggcatcttatgggaaatcaaaggcttcagccaattccaaggatcttacagaccaatgggagcagtaggaaccctggtgagatggtttcatgccatgctttttaagtttacatttagtcaccaaaaaataataggctgatatttttgaagaagagctaccttctttcttcatctttgttatataactttgttatccctttccaaattcactatccaaatattcgctagtgtatttccaaatacactagcgtgtaactgggctctcaatcgccaaaccctggtggcattccaaagtgtaaattttagacacctctgagcagattttccatgaacctagagatccagtgagagacaaattctaccaacaactcaatcctctagccagtgaaggtagccccagcagacagcagggaaagcctatactctcaatcaaaggtaacagctcaacatgccagagttcaagcattatatagatgtaatattattcttacaccaaaagactaagctgttgatgagaaaattgcacacatgctgaatgatgggcttaatgtcagacagccagatgtttttacttagggctctttcccatctttgccagcaggcaggagagaaaaaagaagacaacaatgttctagattaggagctctctgagagcaaggagtgagaagttttgcttttacaacattaatctttagtgtatactacattcctggcaaaaattagatgtcccatatgtgtttcttgaattcatatgttagcactcaaatcagttaattttctatttagcttaatggaaaaaaatgaagacttgaaatttttatgctgttaaatttacttatctgtatcacactggaaaacatccttacgaaaaactggaaacagtcttggataggggcttggggttttttctttcaaactcaacaagtaactctgttgccattaatgaatactgtaaaggtagtctttatttgtaaatgtatatgccaaaggcaaatatagtctatattctaggatttacagaataattattttgaaaatttcttaaaaacaaaattttcttgtgtctaaattatttgttcatgaaactttgtaaaacatgcaaattttaaagaacaacctcatgtaagaaacataaaggctaatttttatttaccaaataagaagctgtttttcaaagcccagttcaataggacaaaaagttttcctgttggcaagcataaaaactcattttcagcatttaagctaatgaagcacttggacaaatgctcagttcaagatatttcatggacagtgtgggcacacatttatatgtctgtgagcatacaaaataacacacacatgtaattttacaatgcaagttaagtataaggaaatggactccctttcccaggcaccgggcattaaaaaagaaaccaccccactgggaaatggaaggattaagcagagattcctatatggcatcattcatcttgcacagatattagcttgatgctcatgtgaaaacataaaaactccatctgttccctaggcatacttagtttgttgttcagatggtttgttttaaagactaatttgtaatggttaagttagttatttcaactgaaaaaaagtgtacaaaatggagcttggcatctggttttgctaaaggtgttaagcaatatttaagcagctgagtgtcatctctacttaaaggataaaatgaacaagggaggtggattctgcctccagatagatgagcttcaatcagtatgaatgggaacagaataaaaataagaaaattattatattttaaactctaaggtcatcctcaaatgtatttgaacttttcatttagatgatgtagccatatgagaaattctgtgtaacttgttctactttgatagtaaaaccttaaatatttacatgtatcaagttatacgtttaatttttttcatttctccaattgccattggatttgggagtaattgggagagtgcaataagatggcctttgtttcctcttaaatggtaatttgcaccttcactgtcatggtgtcagatatcaagtgcagatgcctatcatatttttatcaaatataattttgttaggagaactaaaagtacgactgcaaaaaaattttttttaattcacctatttttcttcaagggatatgtgcccttgactaatgaaggttcctccttaatctgcgaagtttctgcaaagcttgctgagagacacccacagagtggaaaccaggcagaagagaagactcacatgcccacctcaccggccaaagaacccttgagagcaacagcacaacggatgtcagagccaggacatccaaggtaatgatgctattcctattatcacctgagacaacatttgtgtgaggattcttgcatatggccatattaaagatttacatttggagttttgctaacatttccaaagcagttgagacacggaacatttttgttttgaaagcatttcaaaacagttgtctgttaaattttggaatgtaaaaatgtagttacacttggcatgggcatttaaatgtaaaacatatctctgtgatccttttcataacagcaagattctttgttggattggaaacaaaagaaaatctcaaaacactatccaaaaaatcttccttgttgtccatcaggatgtctcgccgtgtagatctcacaccctctagttttcgaaaagcaccacggaccctcattcattgcttattacttttattcactctcattctacctgctttttctaattctcactggatttgaaaaagcaaattaggagggcattacatggggaaaagtggggaaagttcttcaggaaactgatggattactgtatattattcatttaaatctattgagctttatggtcatatgtatccctttaaacggtatttttcttctatatcaatttataatacagtataacttccctctgtatacagctatcccaattcaggtgagaagaagagcaactccaccattgttcatggtcataatcatcagatctttgtctttgttgagaatacaaaattcaaattttctttcttctactaagaaattaaattaaacattaaatagtaaatttttagtgtttactgattttctctccttactgtcactgtgtcaggctccaaatatcaagccaaatatatttaatatttaaaatgttgaaaatgtttcctcaattcacctcttttttatgtggaagaattttttcttttaaaaatcttacaatgaatacttatattagaatcagaataaaaacaaaattcttattactaacaaatttctcaatttaagctcttttcacctatatattcgtactttatttaagttccctctgatgttttaagttcttcattcttaagacagccttgtttaaaggttaagagcatgaattctggggctgaactgcctgggttttaatctcagctttgtcactaattagccgtgtgcccttgggcaagttacttaacctctctgtgctttttgcacatttgtaaaactgggataataatatctgtttcctagtattgttatttaattgttatttcatattcctagtattgttatttaatatgtataaagtgctcagaatagtggctggcacacagtaagttctctataagtattcattatataaataaaataaaataaaaaccttaaagacagccattgattaaattccatttggacaaagccagataaatggccaacactttgcttgtcttagattatcatcaaaatgtgatctctctcattttacactgattttttctgtatgtgtcgacatccattttaacataatgacatcacttcatttcactttggcctcagctgttaacagagctattgaacacttggtgtagattaatttatctttcacattttaatatgactttctcaccataagaaaatcctcatgatatactaaacaattttatttctagaaaattcaatcttggagataagtgattacttctaagaatatccataaaaattacaagctcaattacaactcatctgctgttttaaatgttttcttcttttgctcaattacagttcttctgggctttagctcataatattctgaatataaactctacattttacctgatccttttctaacaagagttcttcaaacactatgctacttaggaaccatgatgaagtcatggtgtaaaaatcacatgtccttacaaactcacatctttaaaacttgtatgtctactttactttgattctaaagttgtattttgttgccatctgaacacttgagatataacatttgaagaatcaaggtataaaaccagagtgagtagaatccctggccatccgttactattgctgggttaggaatccatcagtccaacaggcagcctctcaaaacccaaacactggatatgcatatgccaaatggacttcagctgaataaagtgaatactgatgttggtatttagaagcaggtccttctcaaagaagccttggtacacacctttgacccttaactggggtgctccaacattgcctgtgatgatgactcccagtgaaggctctgcgctgtgcttggctgcatttctatctgagtgccaacagcaagataaatgaaagactggttcactggagtactggtggtttgggggctattgatttttggtccattctctttaaaagtgagatctaaaaagttgacagagggtcattaatttcatcatatacttgtcgtctcatccataaccaatccagagtctgagtgtgcttgtcactctgtgtttgcactttatttgtttggggttttcttggtgattccactcttttttttcctctttcacttcggcctctttaaataaagaaagaaaagaaacatgccagtttgtggctctttcctgaaaatgatttggggatggggaaagttatagatacagatacatagagagagattctggtaataggaaacagtcagaaaatagcctcttccagctgccttctaacctgggtttaaaaaaagaaaaactccatataaaattcatcaatcctaattattcaattagcctccaattgaataaacacttacttaggtgaactagtggacttgttttaatgaaatattaaaatacaagttgccaacattctttttcaaaaagcttctgggttctcaacaaatgttgttgaaatgtacaaaaataattgatagtaatcgttaattgagtttctttggctgtaaattcagaacaggtctaccaatcctgcaagaaacaccaaactgaatttcaagatatcgtgaaaacaacttactggtgagttttattgttatgatggcaggtttatttcttgtttgttttttaacagggtaaggagagtttggcagcctccataattattattgaaataaccatcaaataaaatctttaagcctggttgaattttcaatgagctgtgtaaatctggggtgtggaaaacaatagcacagggcaagagtagaattccagaaaaataagcagagatttttagacaattcttcagcagtccacctagacagttatgtcctcctacctgactggggatgtagttgattctatagtatctgttttgaaacctagttgcaagactgcaagtgaggaaagcaaaggaaaatatgattaagttcacgggccaaggcaaggaaatccagtattaataatatcacaacctgccagtaaatctctattttataggtgaagaaatacatttctactttaagtgtgtttttatatacccttgagtgtccaactagttaaactaccaagggagctctacatgatttagaaattaatccttcaaatagctaacaattgaatgcctcagctgtttgtagtctcctaccgctggctaatttcatttttgttttatatgttcagtggtaagctttcattgttcgctgacactgaggttgtaagtctagttaatttagttaaaatgaggctgagaatgttcatagcttttcaccggctacaacaagacctgggaaaacttggagtgaacaccccacaatgaaactcaataggaaagaaaattgagatgacccagctcatggtcagctttcatcaccatggaatagggatgtaaataaacatctttaaatgtgttaaaaggcttctaagatctgaaaacgtttggtgctttgcattatctcaggctctgtggttacttttctggccaactcccttctcctctttttatgtcaagtcattttcccccaaagccattgcttgaagttgcggtaaaagacaaacctaacagtcttcgtgtgcttcttactaacaaaacccactaattttttttttcatctgcctatcacctgctctgtttcctcccactctcccagggttccctacacttttccttttagctgctcaaaggtgtaaatctccttcccatgccctgattcctcatttcccttccccagataactcctgccccttcctttatttcaacatacccatcccttatacaagttatttttctaactcttcatacaagatctgctccactggtctcatgttctctcttttatgtgtacaaacacgtacttaattcttcacagcactaatcagggctgtaattaaacaattaattgtgtaattaatttttagggtctgtctttcccattaaaatgtaagctctgtgtagattgggaccatatttgtcttatttactttcccgtgcctcagagcctagctcatagtatacactcaaaattttgttgaatgaatgaatccattccaggatcagttttctcacctgcaaaatgtaataaaaaggaatccttgcttctcaatgtcattgttagtatcaaatgatataacaaatatttgaaaaatactttataggaaatcaaatgctataagcattattgttaatgcattatcattaatgcataatggtagcaattgttgtaaccatttctgacacatggaagcaattgcttgaaaggaatttgtcaaatgacaaccactctgatcttacttgatcttacttcatgcaaaagcagccaacaactcgcctgggaacagactcccctcatctaccctgtgcctgctaggcagactgccaccaaggaatctgaatgcagaccttcataattccattgtaatcatggtcttggttgaactcaaaaaacatttttgggcactgtgatgggtgttagaatatcctagcagtctttctagggcagcgtaagtcacattgcctagaaaaattaatattctaatagtaaagatggacacagggacagatcgttacaattctagtcaaattccataaggggaggagccagattataacagaagtgcactgaactcaatctggagcctcagtcatgactttccaggaggagatggtgactgagctgattcttaaagaatgaacaaggtttcccaggtaaaggtggtgagagtgctcctagcagaacaagcagtataagaaagatacaaatgtgtggaacagtaagaagtacaggtcaccaatcaggtgtcctgtcagtaggaagccagcagggagtctatatctacaatgtcttagtattccagcagttgcataggaacctaaatctgagatgtggttttatcaaccaaaagtaaaattgccaaaagcccagcaaaataacctatgagtgacttaaaatcaaaactactacctatcacccctgttttagcatcagctaaatatagctgcttttagaaaagcagcttatctccacaatagtccttctgaaaaactaattatgtgaaagtatgaaaaatgtacatttcaaggtgtacgtttttttctcctacccagaagtcctcctttcaactctccagcaacgcccccttgcattcataaactctgtgtccacagagatacatgcatttttccagaaaagtcattaattttggaatttaagaaatatgaaatagacaaagtgggtaatttttcacacttagaagaatgtacccgttatgttttgactctttttcttgcacagctgagaaaagattaataactcactttctctattaattggcttcccaggtgccataaaagatggtacccaatcaagtcacttaaagcaaaaaatgcccatagcactcattaacccccaaccagagaacgtggtcatcacacattaactttccagcagctagccttcctaagaaactgatatgatattaaagctccagaggagtcaactcttaaataaattgttgaattatcctcttctccgaaaggtacccaaaagtattttatattaaaaaagtagccaagcacatgtgccaacaatgcaaaagtgtatatgattacaaacaattttattttgcagaagcttggagttggaacaattctagcttattgaggagctcttcaaattagaaggtaagagagcaaatcacaaaagatacattccaacttcctctattcatagccataagaaaaggccaggggaaaaaataataaaaggtctgaagtcctatgagactacacttaaactctgaagtctaggaaactcttactttaacattagcaagaattccaaagatttgtatttagtctaatggaagagagaaaaaacgagcttcttgatgacagcaaaaccacactcagatcattggaggtcctggcaaccagatacaaatttattcctttaggagccctgtcctttctgttgaagctcactgctggaagaataacacaacttcacagtcacagttctgccatgaaagcaggaatcatggggtacaggtgtatgagggggaggggacaggcaagagggaagaaagtgatatgtattagactgttctattcctggccacagagagagaaattctgaggcatgtcacagtgcttgatgtgaaagcctagtaagtcaaaacgggaagaaatactttcagaatcctaatggtcctattgccagagtataagttatgaggaatctggtgtatctatcatctagaaaccaaacaaaactaaaaatcacaggggaattactacaggttaaaaaaaaatgtctattttaaagatttagagatagattcaaatagctagaggagggtctgagctatttttttattacaataaggcacacttttaaatgcctaatgtccttttgttttaggggggcttgtttgttgttttgtttgtttgttttgagacagggtctggctctgtcacccaggctggagttcagtggtgtgaccttgcctcactgcagcctcctccaacccttctccacacaacttccccaatacccccatccccaccccaggctcaaacaaccctcccacctcagcctccagggtagctgggactataggcacgtgccagcatgcccgtctgattttttgtatttttgtagagatagggtttagccatgttgcccatgctggtctctaactcctgggctcaagcaatacactggcctcggcttcccaaagtgctggggttacaggcatgagccaccacacccagcctcaatgtctcttttttttaaatctctttacctttatttttgcttctgcttttctttctaagtttacctcaggaaaaaaaaaaaaattcctgctttaaattctagacacctatcctgtgtaactcctacctagcaagcattgaatacatatatttaaatgaaagcagatttatcatttaatcagataatggagaacactgatgaaaactaagtgaaacttctcagaaaagtcacacgctctttgggctttatatccaggaatccaacaaggaggaaagtaccatcccagctgagcattaattattcttccttagatttctcagctcccatgatactgcactacattgcctaagtcctatatgttaaccactctcctttgctatgtgcctataatttcttgtttattctttcctcctggctcctcatcacaatgcctggaatcacatttgtataattttggaggcaaacaaagcacttccatgtcgtttccctcttctgtttttctccttgtaagttcccattttccatttatacaattcactctatttaatagttttccttactattctatttatgcccacttactttgatgatgtgcatttatttatgcccccttcattttagcaaccatgttttgttgtccacatgtcttgaactttcagtttaagatctttagctgtgtagacttgggctagacttcatgttgtctggaattctaaaatataacaaaatcttgccatgactacatgtgcaaggatcctaagagtgtttctctcaaagaaaggataagtgcttgaggtgatggataccccatttaccctatagtgcttattatacattgtatgcctgtatcaaaatatctcatatacccaataaatatacacaccaactgtgtaccaacaaaaattaaaaattaaaaaaaaattaaagtttatttccccattcaagaggttagttcacccaatggtgcctataatattgtgtaaaaaaaaaaacaataataataatatattcaggaggctgaggcaggaggttcacttgagcccaggagtttgaatccagcctgggcaatatagtgagaccccatctctaaaaaaaaggaaaaataatagaggagaggagaggagaggaaaggaaaggaaaggagaggagagaaaaggaaaggaagggaaagaaggaaaggaaaggaaaggaaaggaaaggaaaggaaaggaaaggaaaggaaaggaaagaaaagaaaagaaaaggaaaggaaaggaaaagaaaagagaggagaggagaggagaggagaggaaaggaaaggaaaggaaaggaaaggaaaggaaagaaaagaaaagaaaagaaaaggaaaggaaaggaaaagaaaagaaaggaaaggaaaggagaggagaggaaaggaaagggaagggaaggaaaggaagaaagggagggagggggaaggaaggaaggaaggaaggaagaagagagggagggaaagaaagtaatataagccttagtgttcattttttcaaattgttcaatttatagaaaatcctaatcatgtgtttaaccgacataaagttcaaagacaaggtcttaatgactgcttactattgtggtaagacaaatatgtcacatgttctaaaaatcaatcaaaatatttactaggcccctactttgtccctacctggtagttatcaatatgtagacaccacccagataccatgccaaatgtcaaagatttttaaatcagagaaaaacctagagaaggagtcattagcatccaacagtctcctggtttccaaaaggaggtccaccacagtggttccaacctgtgagagaatcaaaagtaatcttggaagctttgtcagaaatacagaatcctgatttctacattagatctctaaggtaaataaggctgtctggaagtagattcaggaatttgtacttttgaaacttctctggtgatcagaatgatcaccctatctacaaactgctgatttatctggccttcatcctaatccacaggctagccaaaaacacaagagcgaatatatgaggttcccagccactgaaaaaagagaaaagagagaccactatccctaaatattgtgaaacttgaaattcagcaacacgattttgagaacattaagaagtcactactttcttgctgtcctacaggttaggcgaaggaagaaatatgtttaaacaccagatacggcagggcgtggtggctcatgcctgtaatcccagcactatgggaggctgaggtgggtggatcatgaggtcaggagatcgagacaatcctggccaacacagtgaaaccctgtctctactaaaaatacaaaaattagccgggtgtggtggcacacacctgtagtcccagctactcaggaggctgaggtaggagaatcacttgaatctggggggcagaggttgtagtgagccgagattgctccactgcactccagcctggtgacagagccagactccctcttagaaaaaacacaaaaacaaaaacaaaataccagacactattagttttgggtacaagagagggaagccaattacacatatagcaaaagagaaggaagaataaatactatatatatgtagtattcattatatctatagatagatagatagatagataattgaatctatagacaggttctcagagagaaagaatacgctcgcatctttcctcccttttcctatgagcacgactcaacaggacagattgggtcagtagcttaggtagaaatggtccaggtttgagaatgctaatgagcatgtcaaacaatttagtcagtcaccacgtgccacctctcattcacaagatgaatttcttttgtagtggcacattgaagggagaggtttaaatagaccttgtggaaggatctgcatcaataataatttccaagcaatcccactaggaagacaactgtctaaagtcagccgagagagcaaacaacaacaaacttcattactatctttggtattttgtaaacgtcagttcctgaagtccagccttccagcctaatgctccatactagaaaaagccacttacccaacacccctatcattctttccttttttcaatatacggtttattaatatagatgtcagtctgtacttacaacccaacataaaatatccttgaaaatggaatgtcaacagaatggtaatataccaccttgggttgatgggacagttttattgcaacagcttaatttttatcaatattatataaattatattgttacaatcatatatatttatgattagatataaagtaactgctttttccctaatgctaaaaactctattatgtgaaaccttggtgttaaaagcagggtttgaggttggcagcccatgttttgtgtaataactgctaatcctccaccaaagaagagaaatcatttggaagatacaaaaactctgagttttttatgctctctgaaacctatgtcatcaatgtggattaatatttgcccccagaatgattctgcaggtgagaagagataactgatatatattagcttagtgtctagtacttaaccacccattatgatggtatctaatcaatctatattgatatctgtctgcctacctcataaaatctgtaggtagatactattatcccatattacagaatagaatactgaggttcgataaagttacatgtattaccctagatctcattgctagtaggggccaagctgagttccaatttcagtttttgtgattcttaaagcctgaacaactcctactgtattctcctcaggccaacagtctgaattactaacacagcacgtaaacaatcagaacagagtccatgtatttattggtaacaaatgcacatacaaatcacttgaaattccttttaatgataacatagcatataattctataggggaaaaaagacaatttgtgctcttatttgttgccaatggttgcacttcattctgaaagtcatttaatattgaaataagtatctttcatgattatcctaatataaccattttagttctaaccctgacaagcagcaaactttgtcccctggcccaactttatcaagacggttgaagtgtttttttaagttattcccattttgcttctggaaaaactgggcacaggatgtttcatgaccttcctcttatgcaccctgggactgaatttgatcacagtgacaagccaaactgagaatttctaaggccaggaatacgggctgccctttcttttaatggacacatggatgaaatggtaatgtttccttagcacattaaaaatagtgactaaaaagtcgaagttttttttttttccgaatctaatagctgtcttaaatcgggtagaaaagaaagacgcaatcattccttaaatgcatatttaaaattcaccaagccaaagccagtcttgccagattttgtaatcctttccatagtctttgtaaagtacctagcttgccaattaaaaaaaaagggggaggaggagggaaacctcaagtggtttttaaccaccaataacaaaaacgacaaaggtattttgaaacatcagttgctgctagttaggagctagcatggatgtctctggctcaaagataattcttgctcatgttgggtttttttttattgcaacagtataaaatcagataaagataaataaaatgaaatggaagcacagagatatttgctctaaatatggctaaagtgaatttgtggcttgatgccacttttcgcagctttgttctccctaatctaattatgccttgaagttgtctgcatttgagaaattaatactttgatgaaatatctagccagttccataagcagcagagggagaggaaagggaaacatatatatagtattaactctgccagccttcaaccaccacaagacctcctgggcacaacagtggcccactaataaaatgaaatgatagcatatgtgctttgtttaattttgatgtcttcataatgtattacacaattagattgatttgacaatttccattatgcttgataaaatatttattgagccctgaagatgataactcttatctaaccaccatttgttctacagatgtgacatatttaatatataagtaacatcactcagatctatgttccagttagcccattacattttatttgcagagtacagtgtaaagtcatcaataacgctttgatagatccctgtctgcccggtgcttgacaggtgcggagagagcttgctcacattcagcggcaggggcacatcaatcatggccaagaaatttactgtgtgaaattggcctcatctgtctcaatgcttgatgcagatcgagtttgttcttctgatagaggtgtcgttagtcacctaagcatgcctcccttggtactcatgctctctgcaagtaatcttttttttctcccccttctcccccttccctttacatatttttgtgaaattaaaatctcgccctcctgtgaccctaatccacatattcttggccaaaacaggagccaggtgacctttgagattacccttgtgaagccttgcaggttgagtggaagaagatgctattttttgttgatgctgttctttttttttttctttttctcccctaacctcacaggcaacatgttccactgatgagaaaaccggcaaagacaggttaggcagaagaaaagagagatgagacaacggactgtgccaacaaactaaaattttacctgctgctatggataaaatagctttctttttagaaatactcatgttaataaactcctacatgcgacataatatgtgcctagaggtctggataagtaagatgtgtgtgtgtgtgtgtgtgtgtgtatatatatatatatatatatatatatatatatatatatatatacacacacacacaatttcatttgcaataggaagtcttcacactgcaaaggtctaggtagattcctagttaaatggcatttcaaattaaggcatctacccctgtcaaaggagaactccaaatggtaactggctcccacaacttcgaagtgctgctgagaccctcatcagcttttatctttgcgccccgtcattctcccatgggcaaagaattgcacaaaaatcttggagtaaacacaaacaagtgccaaaatgaagaccatcaatgatccaaatccttgcaaggtataaaagagaatttttttctgagtcccgaagtcaagattgttataggctgcaggatttttatgtgagaatggaattgtaagattaatctttggccaagagcacttctctgtttcttgcaaaggattagctgacttaaactagaggctctgcgtcctgctcctggagctgcagtcagctgtttttcctttgtggagcttcctgatatgcccaaacacctttcttcttaacctttgtagttatttcagtatttacttcattctaaatccttatgcagactttttttttgctttccaaggcaaaccttgtagatagccaatctgtactgtttccaccaaattaatgtgagagcttgttttagcaactgcaaaacaaaagtgatacacggcttcaataagacatattatcttcagaacctgtaaaagttgagactatctctagacaaagcgcaagcacaggatagtcctaccactgcagtcaaaataccacagaagctacatgccacagcaggatgcctgtcggatagacaattaaagtggcccaggaatgacatatcccctcttgccaacataattaaggtgtattatttgtcagggaggtcaacggtgaacaaatgtcctagcaaactgagaatgaaagacagggaaggagcagataatgaaattcagggatgacaaatggctcggagcctgacaccgtggcatctgacaaagagagacatccaatggctctgaaacttttcctggtgctctggaaggctcttggatttggggcatttttacataaaggatgttgcatgtatcattaatgtcattccatttccttatagaaaagtattaatattgacaactgtagaagaatgatattgtcaaggcagaattcaatatgcggtatggtttttgtcatgtgtactcactctgctgctcctttgtgtcctatctacacttgttttacagccacctagagtaaccagcctatctccacttttcccattacttgttaatagctattgtgcagataaaaatgcctcagagtgacctatagggacacctctgcctttggccaagcacccccacaagtgagggtacgaatacttcccaagctaagccaagattgagttatgttcagacaataagtatcaccaattactacccttcagttgttcccagataccaaaggcttaaccacccacgggaatagcgactggtgcctgccacttccctaaggttgtgtgtattgtgctaggatatttgatagacttgagtattatggcttaaaaaaactatacaggagaagggatgccaattcctaggctaaaccagcttcctttgtgaacaaatatctgggggtgttcctctgtgataaaaaccatttacgtcattttaggcccatttttaaccatactgggtcattttacaattcagagagcacagattaaccatacagagccagcagttattgatgtggaacacagtaggactccacaatcttgtaatgctacaatgatgtagtcactaatttgtttctgcatctagcattatttattcaccaaaatatttgttgatcacctattatgtaccaggcatagaactgaatgggagggccacagtagtgattcagacaaacataatccctgtctttactaatactgtagccagaaagacagacattagccaacatctaccaagataactaattagtcataaatgtgataagtagcaggaggaatgctggaaaagcttttgaccagcaaatctaacatacgctagggtctcaggcaggaagtgacacttaaggtgagatataaagcaagtaggaattcacatagatagggatgtgagtgtgtgtgtgtgtgtgtgtgtgcaagagacagagatgagcagcaacaagaaggaaagggaggcgtctaggaacagtatctcaagcagaggtaacaaagaccctaagaaaggagaaagtttgggttggtggaggaaagaatgaagcccagtgtggctggagcatagacagtggaggagacggtcacaagggtgaggctggaaagacaggcagggccagaccatgcaaggctttgaaggctcttctaaagattacggccttcacatgcctctgcaattagagaaagcactggaagtaaagccaagcagatatcagccaatgtgtctgagcagtaaagatatggaggtgaatgaaacgtctcattttcagattttctcttacctaaaaaaaaaaaaaaaaaaaaaaaaatttgcctgattctcaggcacaaatttagaaagcagacacatttggtgatataaccactaaaactcatgcctaatgtcttctaaattttatggccttttccttatagggacctgaaaagctcttgacaaggcaggaacgtgactaatataattgagcacatactctgtcccaggcactgtgccaggcacctttaaaatctcttattttaatactcacaaaaatgttaagacaaattccccattttttaactgaaacaaatacagagtaagtaaattgtccaatatcagaaaactaccaagaggcctgaatgctaatccatctgactccagattcgatgtactttccacagtgaagacaatggacttttttctacattgattcgccttttggtcaaagtggagtcatcactattggtataaaaaaagtatgatgatggttttctgtaggttgccaaagactaacatattgacatgtgaagaattcaaatataattgtgttttttcaagcaagctagtgctgtcttctttttatttaattgaaagagcttctttatcacatatactgtcccatgaataccttccatcctaatctccacctcaaagcattgggctctacctgctagcttgccttcaacactgcaatctgagttcttcaagtactactggagtacttcccagaagtaggaacaaaaggatttacaaggtgtatacaggtggctcgctggccctacactgctcttcctccttctcatctgctctcagtccactgctcccccaaccccttcccctgtggctgccattcctctccttctctttcccactttttttctcatctctttagtcactttgcccgtaccatttataatacctctttacgtaaataagttggccttttatatcaccagccatttttccttccactagtcaaagtataggatcctttagtgttctctgctgtgtttgtccaagctggttggttgatgatagggcgacctggtaaccaatgaggtgggtggtttttgttcttcaaaaaggagatgaagggagataagctgtttctgagccacatcctagaagcctgtgcttttcaggaggctcctctctgaagattaaggggcatatttgtggatgtgtgttttttgctgctactgtctgcagagtgtcaaggatcaacacattaaaagatgccatttttcctggtgtttctgagttcttggggcgggggggcttgtttgttatttgttgttgttttgttgagttttgtttttgctatcctcattaacaatacatggcacaaaatcttaaaacacgtttctgtacttcacaagtcaacaaaaagagagtgtacatttctgttttaaccagaaaaagaattaaactttataaaaataaataacacctgcccccccaaaaaagcaaatcatcaccccaggatgacagaaaacatcggttaaaaaaacaagttaagaagtttttaagctgaacacaaatctactaatgtgttaatcggtcatggacattagccaattcatgacttttagctgtatatcttggcatgttaggttatgctgggtattaaaaacaattctgagacaatgttgggattggcaattttaaaaaagcctcagcactttgggaggacgaggcgggtggatcaattgaggtcaggaattcaagaccagcctggccaacatggtgaaattcagtctctactaaaaatacaaaaattagctggacattttggtacatgtctatagtcccatctacttgggagcccgaggcaggagaatcgcttgaacctgggaggcagggggtgcagtaagccaagatggtgccactgcactccagcctgggtgacagagcaagactctatctcaaataaataaataaatacttaaaaataaaaaaaaaactaaaaacttttcacagtgtctagaatataatttgtctattccacaaataaatatatattattccagtgacaaatctgtgtgtgtgtgtgtgtgtgtgtcctcaacacacttcactagcttgttggacatttccctagacacaacaacctctggtttctgttaagtaaaaagagaatgaacattactgcaatgactgctccatggtgaggtgttagcttttcatctacatgtatatggagcaaaaaggtttcattcttaattacaagtcatcattttaataccatatctcaaagatctgccccaactggaattcccactgggcactgatagttttcatttgtttcttctttttgttattgtttggtggtgggaagagaaatgtaaagtacaactcttgagatcatgttctgaatcaggaatttatagactggagggaatatgctatctctctccttaaaaattcaactctaacacttcatgcatagatatcaagtacttcattacatttccagtcactgtgaaataacagtttcttttacctccaccacgatcttattagagaaaaaaaaagcaactaaaaaaaaggggtctaaatctcacagtctgtacttcccttacaggctgcttacaaagttctcatgatgaaactaagacacactggggcgtgtactcgcctgtgtcattcaccatggggaggagcactgcagagctctgttacaggggagcttaacccacgttctttttttttttttttttttttgagacggagtctcgctctgtggcccaggctggaatgcagcggtgcaatccgggctcactgtaagctccaccttccgggttcaagccattctcctgcctcagcctcccgagtagctgggacctgtacaggcgcccgccaccacgcccggctaattttttgtatatttagtagagacggggtgtcaccgtgttagccagaatggtctcgatctcctgacctcgtgatccgcccgcctcggcctcccaaagtgctgggattacgggcgtgagccaccgcgcccggcaacccaccttctaacaagatgaagtcatgcatcgagaagtcagtgctcattgtctccttggcagttcatcttactaaaaaccatcagctggactgaagaaaggaactcatattaacctactctgagcagactcttgattttttatttctggtgaataacactgtgatatgttacatgttttagctctcaatgaccgaaacatttaaaattgataggccttttaaatctatggccacgaagcagggacttgccaatatttctaatggaagtctccaaaagtacataacaatacatatattgacttcttgtttcaaggagtatcaagattaattgttcctgtaaaggtaaataaatattgacagaggtttcactttggtccatattttccacttgggtcaataaatcttggtattcacctcaactcgaatcagtatcaggtgattattaattcatggtatactcgactagcagccaaaactacaacttaacatatagaacacagtcctgcagaccaatttatgtttaaataaatacatggagtgaaaaaccattgttttatttttatttttattttttttttttttttgcccagaaacccgcattttattgacagtcattttcccacagagaatcttagaaagatgtcgcattttcttttaatgaatgagagaagcccacttgtatccctgaatcattgagaaaagcaacagatacaactgacagtcacactttttaaaatcaaacagtcactaccttcagcccacacctccacacccgcatctgcctccccaatggctgtcagttcggtaaagtcaccctctccttctactctggtattaccacgagaattgaaatttttaagcagaaaaaaaaagaagtcaagttacaaataaatgagtggcgaaccaagggaagccctttgactatgatttccaattttctgttcaatccacactgcagagatacaaggataaaccaccattttggttcccaagttttattcaagaactcatacaaaattttccagataaatgaaatttaatcctcgtcttcctcctcttcttcgtcctggttaatctggaagtaacgtaattcgtaactctctttgctgttagcaactacgcgcaaccagtcacgtagattattcttcttcaaatattttttggtgagatatttcaaataccttttggagaaaggcacctcggatgtcacggtgatcttgctcttgctcctttcgatggtcaccacccctccaccaaggttcccagcttttccgttcactttgatcctttcttgcaaaaactgctcaaaattggcagcatccatgattctacagggtgggtgcaatcaagagtgaacttcagaacttgcttcttttttttgcccccaaaaccattgttttatataactaatggaaagtacaacctatagctaccaggcatttaaaataatctattgttattctgttatatttcaatttctctagtaaacaaaaagtgattctttttatctcacaattcaacattttgctttgcccaatcccattactgcttgcacttattgatgagctttgtaaatatgtgaatgtttataacagaaagaaaggatgaagaacaaaggaaggagaaattttaaaaagaaacaaaagagaaaaaagaaagaaagaggagataaagaagagggctaaagaaaatattggttagaagaattgagagacataaaaaatatggaaggtaaaaggtaacaaacttagggagaaaaaaatttaaatatcacagctgattagtgtgtacttccataaatttcagcaaaagatatttatttctttccaatattcttttccatttaaaaagatgctctgcccaattctaatgacttaaacatcataaatattctagttttccattcaagatttaaaatgcaattagctattaacttatataaacacctcaaagaaattttaaagaaaatttattttacacagtaaatttaggagcagttgattaaagttttcagggattgagacatctcagctaataatggaaataataattaaatattaacaacagatggatgtttcacatgaaattatggcacttttatttcctatgaaggcacactaacattggaaggcagactccttaagagaaattgctcatcaacactacaaattgacaagcatatcaaaagagttattgatctctatagcataccagctcagatatatcagtagtaaagcaagcaccgagactgattacattagctagttgatattacttagggagagctttgcctattaacggggcttcaagtgcacctttcccgaagtactgcatttctgatctttactcttgcttatttatttatttatttatttattgagatggagtttcactctttcacccaagctggagtgaagtggtatgatatcggctcactgcaacctccaccccctgggttcaagaaattctcctgcctcagtctcctgagtagctgggattacaggcatgcaccaccacgtctggctaagttttgtatttagagtagagacggggtttcgctatgttggccaggatagtctcaaactcctgacctcaggtgatctaaccgcctcggcctcccaaagtgctaggattacagggatgaaccactgcacccagccgctcttgctcttttaaatcaaaataaggttaaaaacaaaattttattttagccagaatattctcgttagtgttatattaaccaatcactttgtagtcaacaaaatagtttaaatgcaaatttaccttagagataatttattttctaagaattgtgagacattcattaacttaaatttaccaactaaaaagagagggttacaataaaatatctctagaaagctaagacactttatcaaattactagaagtttggaggtgagaggaaacttgaagatcatctcatccaacattttcactttaaaaagagggaaatcaaagcaagagagaagacactcagctacttagtagcaaaggcaaatgagtatgcagatctttttattttactaaaaaggctgcgtgctcagatacactccctttacttttcaccttcaaaaaggcaatttggcaacgaaatatgcgattttgcatttagctaataaatccaccaatagagataactttgaaatgtacaattcttcctctaaatatatatatgtatatatatgtgtgtgtgtgtatataccatatgtatagtatatatgtatatatatgtatatatagtatatatagtatatatgtatgtatatatagtatatatagtatatatgtatgtatatatgtacatatatactatatatacatatatatatagtatatatatgtatatatatactatatatatatgtatatatagtatatatatatatgtatatatatatacactatcccagagacatcaccaagtttgatgtggttttaggtgtggaaatatgaagagcccactaatataaaatgataaactctctttttgtgtttttaattattctttaaaagcaaatcaacaaacaataacaaaacaaaattatattcaacccaagcatgaaagcacttctccacaatgcctaagttgagtctttaataatagtagaagtttactaagtaaaggaggatagctaataatgaagcagcacatgtaatggcattgaaacaagagtgctcattatacattccaggaatgttaaaaaattttcaacttaagcatcaagtgtttatgagagaagaattttgaggccagaaaccaaacagcaaggctcagatctttccaagtatttggagcttgttctgtatcttcatggtaaaccatgaagaattaatatgatcagaatctcctttgagaaagataattttggtatcggtactgagggaatgaagaagaaaatgatacttgatgcacaaagatctattgaaaatatattttgattacccagaaggggaagaacacctggataattaatcaatctgagttaaaaaaagaaaaaaggctatctcctgggatttaggattggaatagagaatgaggaatatgctcatcaaatataaactcagtctgaaacccccagaaacaaatgtgaaactactccaaagcaacgtattctaaatgtaggctctacaagattttctcagataaagccttgtgaaaatgagcacacagccccaaattacaaaacattcaagcaaatactcttttaggagagaaagcaagcagacaaaaggaacttcaggtttagacataacctggttgacctgtagaataatcttctagagaccacaaaatgtttccttaataattaattaatttttaaatcatcaagttctatttagattttttttaatttgtcattagagaaatgatatctcatgtctttcttttggttttaatttttatttcacatttttaattgtatagtccaaaaactaattgaaaaaaaagagtaaaataaagatattttcagacagacaaaggtgaagagaagttactactcacaaaacattactaaaattaatctaaagaatatacttcaagaagaataatattgaacccggaaggaaggagtaggatacaagaaacaatggtgagaaaataaattggtaaataatgtgtataaatctaaataatcattaattgcattaataacatgactcctttggaagttgtaagtacaaggtgaaacgaaaacacttggcagcaattagcatgtaaactgggggcaggggagggggacaatctgaattaatgtgatctacagtgtttccatatttcagaaagagggtagatattacttaatgtgaggcttgttaattatgcacattaaatatctatttgtgcttatttaagaaaacacaaatagaatgtaggagagggaaaaataaaaaataaataaaatttggtgaatcttacaggaagcaggaaaggagaaagaaaaacaagtagaagaaaaagaaacagaaagcagggcaaatacaaaacagaaaataagaagaaagaaataaatccaaacagatctctaatcacaatagatatacatagcctagaagagaaagaaggacaaatttatttaagaaacaaaatccagctatgtgttatttggaagagatatatgcaaaaaagggagggggcgggagggtcggggtggggggactcagtttggaagtaagtggatgaaaaaaatacataccaaaaaatagaaagctagagtggttacattaatatgaaacaaagtatacttcaatgaaaaaatcattattccctaattattacaaaatgacaaaaggaaaactttaccagggagatacagtgtttggaatttataggcataaataaattggaatttatttattccaataggcttactggaatttatagtttaacttccaaaagcatgaagcaaaaattgacagcattacaagaaataaatggacaaattcacaattataatggcaaatttcaacacgcctctctctgtaattaataaagacccaaagttagtagaaacacataaaatttgaacagcataattaacaagtttgatcaaacatatatagaagtctgtatacaaaaactatttttccaggccaggcacggtagttcacacctataatcgtagcactttgggaggccaagatgggtggatcacttgagaccaggagttcaagaccatcctggccaacatggtaaaaccctgtctctactaaaaatacaaaaaaaaaaaaaaaaaaaaaaaattagccaggtgtggtggcacacacctgtaatcccagttactcaggaggctgaggcaggagaatcacttgaacctgagaagcaaaggttgctgtgaaccgagattgcaccactgcactgcagcctgggcgacagagctagactctatctcagaaaataaaaaagtaataaaagtaataaaaacactatttttccagtttatgtgaagcatttataaaaatttgccatatttaaccacaaagaaagcacagtacaataaaaatgaataacaaaactataacacaactcatgtttagaaattttaaagaatattaaataatatatgggccaaaagagaaatcatgacagaaattataaaataatttaaactaaataatattgacaacattatatatcaaaacttgtgaaaagcagctaaaccaatattagagaaaatgtatagacttaaatgtttatactaggaatgaaatggagtaaaaaccaatgaatgagtccaattcaaaaatttagaaaaggatgaacagaattaaaaaaaacaaaagtttttaaaagaaaagtaaaataccttttaaactaataaaacagatgaaattttggcatctgaattaattttttaaaaggaagcataaatgaaaacattagtaatttaaagggggaatacagatacacaagagatttttaaatgctagatagactactatgaacaacttttaagtcaataaatttgaaaacccagacaaaagaataacttcctagaaaaataaaacttactgaaattgacgcataaataaagagcaaatctgaatgtaaccatttaaaaagttgaatatgtagctgatctccaaaatacattaacctagtattaaagaaggggttttaacagattttcaagtaaccagtaatcccatcctaaagaaattgttctagagaacatatagagaaagtgacaagtcaaatcaatctaaataaaaatagaacaggttttgtatgtgtgtgaaacttgacaagctgactgtaaattttatatggaagaataaatgactgaaacaatcttgaggaagagaaagagatttggcttacagatatcaagatatccttaaaaagatgtgacaattttaaaaaagtgtttgtggcatcaggataaagaaatggaccaaatgatcaggacagggacccaaggaacaaacctgcacatttgtgggaacttggtatatgatggagaaggcattattaataaatcagtggggaaaagaataattcttcaataaatagagccagaacacttggttaggcgtagaaaaaaggataaaactagatccttacctcgtatgcaaacaaaaattaaatttcaaataaatacctaaatatgtaaagcaaaatagaaatttttaaaagagaaaatagctttataatatcagtcaaaaacaatttctaaaacaagatgccactatgcataaaagcacaaacatataaagtataaaacgggatattcatagatttgactacttcaaaaatagaaattcctgttaagcaaagttcgccattaacaaagtgaaagacaagccacagactgagagatgaccttgcaatgtatgtaagcaacaaagcattagtgtcatgtaaaactgaaaaaagaaagcctgtaaagaatatgatacaaaatccacagaaatgaaacctgaatggccaataaacatgaaaatatgatcaactttattagtaaagagagaaagtcaaatgagactttgcatgcgctttagagtttcaaaaattaataaatctgataatactaatcattgtatgagaggacaggatgaagagagatctagcaaaaatagaaattgaatcactcttattaggagtgtaaagtgtacaatcaacacgagctgttattaggtggcaaagttaaaaatgcacatagccacaacccagcaatttcaattcaaggtatcgatcttgaaaaattctcacacaggtgcacaaacaaacccaaacgagatgctagatacagccctgtttgtgataacagaaaagcagaaacaactcaactatttttctaagtagaggaacaaattaataaactgtggtgtattcatagaatagaatatcatatgacagttaaagtgaataaatctgttgaatctttatcatcatggattaatctcaaatacaagatgttgagtaaaaaaaagcaagttgaagaatgatatgtacagtatagtaccacttatgtacattttaaaacatgccaaaagagaatctgtagcttgtgatggaacatatacagttaaagttcaaaaatgaacatcgaaatactttacaccaactttaggatataggagaagagtaacagaaaggaggggtgggcctttatctgtaatattttctttcttttgcaaaagagagtttgttagtagatatgcaaaatgttaatatttgagtatataggtatttttatgttctttttcatgtatttgaagcatttcataatataaaaaaaatgtttttttgtagtgacagggtctccttatgttgcccaggatggtctgtaattcttgggctcaagcaatcctctctccttaacctccagagtaaccaagactataggcacataccactatccccagttaacattttaattttttgtggagacgggtctccttacgttgcccaaaccagtcttaaacccctgggctcaagcaatcctccactttagcttcccaaagtgctgggatttcaggtatgagtcaatatgcccagtctgaaacatttcataattaaaaatcaaatgaattattgagtatataacatgaaaaaggagaatagatattgccacttagaaatcctggaatcaggtctaaagtcactccagagacgattgctgaccaaagtagatccacccagggcaaatgtcctaaccaaaaggcctggagtttcctccaggtctcatgagtatggactacagatgatactagaaaaggctctaggttggtgatttgcagaccaagacttttaagtatcagtaattaaaataaataaattttatatacatacagacactaacattatttcacaaaagaaaaggcactataaaacagaaaaataagaataataatctcacaataatcaaacatctttgaaatgaagacttcaatttatcttcatgaataactacatttttctcattttgtctcagaacaatgaaaacttcctaatagactaagaggaaaccatatcccaatgtttgggacctcttgtttcagaaacacagtcagcattgttaccaaccagagccacgtaccaacaaaactagctctgtaagacatttgtaccaacctcaagtggattttagaaactacatgataaattttcactttcttcatcaatccttctagtttcgtgtttcaatcagaaacatgggatctccaagactaaatgtacaaaatgctatgaatcacatcacattcatctattgccaattataaaagttgtttcttttcctggttcaagaagtgatataatttcatctatttttgctatattttgccttgtttgtttaactcaataaaacaggcacagaccatatttaaatatcaaagaaaacacttttatctgggactagaattcttaaagataagtgctttttaagcttcccaagtttggtacattagtattgtcttcaattctgctcagcacaaacacacattcagtttcatggggtcagtggcatgaccctactgactttgaagaagagttttaaaggaagagaagatgcacagtgttgaaaatagatatgaggctatttagatattatagcaagtaggagagaaagttcgtggggtaagaaagaattagctttcaatgaaaagcaaaatacgacctagttgaccaactcaatgaaacagcagtcaagtccattgtatgagagcaaaacttgttgaataaatggatcacttttccattcattcctttgctcaattccaaagccattattataggtttggccaacctcaggacttgtcatccactgaagattattctggaatttttatcctgaatcatatataacaatccctgccttcaatgtataatattttcaacctaagtaggaaataaaaaataactacttgtgttaagcgcagtcacaaaataatattaaagatcaagttaaatacagttatttaccatacacgtgtttaatactattattatataaccctacctataatactgttattaaagaaatagtaataaatggagtaaccagtaaaattaactcatattaggcccggcatggtgtctcacgcctctaatcccagcactttgggaggccgaggcgggcagatcacttgaggtcaggagttcaagaccagcctggccaacatggctaaaccccctctactaaaaatacaaaaattagccaggcgtggtggtgagcacctgttgtcccagctactcaggaggctgaggcaggagaattgcttgaattcaggaggcggaggttgcaatgagccgagatcacaccacggcactccagcctcgaagacagagagagactccattttaaaaaatagtaatgataataactcatgtttagaaacataatcgtacctacctgtcttttcttatttaaatagaatagaaagctatagtcagaacaatgaacaatcttcttgttcaagcgctgaaactttagctaatatgtcttttagtcactgtattctatcatttttcttgagcctccagccataccatacaactccatttattcgttcaaaaagatacttgaacatttgctgggtaccaagcactggggctcaagaacagaactcaccgttaatatggtttatttgcaaatatggtttatttgatcaagtagcatgtctcataaaacttgattctaaatacctgtgcaacactgtcattttatattcctcatcttcaaaaggaataatgaagctttaatctcttgcaaaacctgtatggttcttctcccttctcagatagcaccacgagctcccaccagtaacaaaaccacattgctgcctccttcactttgcagttcccttagaatctaacgaggaacaccacactctgctttgaacactgtcttacatacatatatatgtatgtatgtaagacatacagacatatgtatttttatatatacacatatgtatacatatatatatatatttcacacatacactgggtgtatatttatatactgggtaactgaagttcctcagatgggaaatgatttaatctgtagcaacgtctgactctgcatataatgctgtgtgaaacagaaacagccctgacactttatgaatagggaaatgagagagcctattgaagaaagcttgacagcaagaatgaaagaatgaagattcaacttaagctgttgaaagcctaacaagataaagggcaggagagtctccttaaatgtgatgaaataaggcctgaagggaaggaaccatagagagattgacgagtacacactttgaaacagaagatgagtgtgttcaacctgacagtaacgtggttaaattaatcaaagtaccaataaccttaaacggtaggaaagaatacagatttatgcagcaatcatctttgatggttggtgtgaaatttgagctagatcaaagaggtagagcttttgagggaaaataattgttatgattatacagccttctcataacatgtaaacattacactgaccatttcaccgtcttctctgcttgccttgtgttttatttcctccaccttaatattttaaaacaggggacaatctcagtttttattacccaaaggaaacacctaattttaagtgatgttgctcttgtgatttttactgataaatttttgagagggaatattttcagagagtaaacttattggtaaaactaacaagttgacagttcacactgcccagttcttcctctctggctcccaagggcgtaaggcagcccaaataccaagcccgctctttgccttactcttgattcatgttgctatgctttgcaaaactgctacccaagaagtcagatgccacaagttctaactgttgagaatacaattaaagcaaggaaaagttaaaaagatcaaactattctcaaggtgtaagcattgaaatacattagctataagctaactaaaatggccaactaatcaaaacaccccattgaatacactcatcaccaaagttttattatacaccactaagatcttcctgctttcacctatctgtattaactaatcgagagcacaatcttttaaagcacttattcttcaagggaaggtagaggacagtgagggaccctggagcatctgtattttgtaaaagctcccagtgtggtgattctgattcatctttctactccaaacttccaactgagagtcactgccttcatgagaagaaatcttttagttatctattaaactgtttcagccatggtgccattcaccttcatccttatcattaaaaatcaataatgatgatccaaggaatggaagagagtcaataaatgacactagtgaggatggagaggagaatcgtgtttgaaattcacatctagcttaaatcttccctgttgtaggctagatccttttctccttcttggaagacatttggtcaccatgcttctcttaatagtccttcatacagttgaggacagttattaagtcacctctaaaccttctcaataccggtaatcctgattccattcatcttttttcatcagtgctattttccaacccgttaatcattttcattgctctcccctggaccctatccaagttctccacgtatctttaaccttctgtgaattatgtgaccggtttatagctttgataagcctgggtagtgaaaaaggtagaatctcatcacaacagactataattgtatgtgggggaggacagggatggagcagcagatggttcaattgtacagaaagtttcaccacaaatatgatattaatttaagtttttattctttgataattatttctaaacacaccatattataatattctgagctacaattagagtctgtattttacacacctgtctttttagtgtgaacctgtgtctggcctggttcttttgcataatagaagagactatatttttcgaaagaatgcttgtttcttagttgaaacaacttttaattacaaagaagtactattcataacacctctaagaaatggagagactagcatattttcatattccaatactcattctttccatggcttttccaaatgaggctaaatggcccaaacctgaatatactggtaatttggacactggcctcactatcaaaactatgaaccagtcactcacaaaagctcttcagtttcaaagccattagtcacattgtacttacagaaggcagcatggcacagtgatgttaattgatggctggccgcttactagctgaaaactttcagcaggttggggttgtcctttcctcttcttttagaatagataataatagagctgtgtcataagactgatgtgaggatctcatgagctatacctgtaaagtcttcaaaacagtgcctgacacatagtaagcataacgaccctaccagtaaaagggtcgactccaactagaagtcacaaatatggagaacaaatgaggacatgcaaagcttttctcttggatctgcatttaggatatgggagcctcctcaaacaagaaaaagccctgttgttatggggaaattggaagcaaagaaaattctgcagtggccagtggcagaatttctcaccattgaaaacatattagggatgggcagagtctatcaggagttcactggaattcagtggctagccagttgcctctataagccttaaagattcccttgaagacagacaatacacccgtctttggaaacatattctcatgttagaaccaaacgtgcatatggaaattattatcccttagctaagagcttttgttttaaaacccttgtggtgtttgtaacctaaaagagggatttcctcaagttttctaaaactgcctcattttttttaagaatcaccatgatccatacctcatttgagatcaagtgaatcgtcaaactaatgtgttttttcaggaagctaattctgtgacttccttaaagagagggttgctcttcccaagggttatcggcaagccactgctctggctccttgtgccagttgttcttcctgactggccatttcccctctggctggagataaccctgcaatgacttcaaattctttcgttcagtatctgattccatctccatcataaagccttcctcagagcatggttggacctaagcatttccacgtcttagttcattcccaagatcccaagttgacttttgcttgaacttcagtggaaaatccaaatcatgtgaaaatcaaaaagaaaataatggctctttcttgattctattttctaaacatatggtaatgaacaataaatgtttacaggtagctgtgatggctacagaaaaattttctttgggacccccataaaatagattatattcagtaaacacagccaagcatgcataaactttaagaaagattttagccttctatccattcaaactattaccctatttcttccctctttattgctaccattccttctgaaaaagagtttataaattcataacacattaaaatgagcagactctttagttccttaatcctagcagtctgatttagtaatttctttaatggcaatattattctccccatgccacagttcatatttgacttctcttgactccttgcttcccacttactatcagcaaccaagtcctgcttattcttaccttattatattgttctttctatccctattgccacaacctacttcaggtccttatcatttactcccaatgcttcttttgcaatagcccactaactagctctctaattcttcaatttttctctttttctttttcttttttttttcttttgagatggagtcttactctgttgcccaggctggagtgcagtagtgtgatctcagctcactgcaacctctgcctcctgggttcaagtgattctcccgcctcagcctcccaagtagctggaattacaggtgcctgccaccaggcccggctaattttttttcttttactggtatttttagtagagatggagttttaccatgttggccaggctggtctcaaactcctgacctcaggtgatccacccgcctcggcatcccaaaatgctgggattacaggcatgagacacagctcccggccagtttttctctcttgtaattcatcctgcatacctttgccaaaacaaacatcctaaagcataattctgattatgtctcctcacatttcagacattccaatggcttctcattatgtctaaataaagttcaactcatataaagtcaatgtgtttgttgagtgaatcagtacaaaaattccatatgtaggctttagctatttatcgaataaagtacaaaagaagagttttgttttgttttgtttcttaggccaacatatgccatatatcctgtttgtggcctcagaaatgtgtgaatcacattgataaatcagctgaaaaaacaaaagttagtattttacaccttctcttctctagagtcttaaaaactccttcagacttcaactgaatatgcgctttatttctgttctctctattgattcttcttcattaatgtttaatccaaggagctttgaagtacaagatgacaaaatacataatttgtaccaatgttcacaattatttcttccatatcagttaagtgtaatttgaaatattatatcttaaattaataaagaagatttagtaaaaacatgtttacctgtgtgaaaaatatttattgaaaataaaacttatttttaaatcccacgaaaataacagaccaaaatggcagtgtaagtacatgccaaaattgccccctgttcaaaagcgagaaataatggataatgatttttaaaatatatgaaagtgaaactctgtccaaaagcaagaaagttttcatggaccataaaagaaaaggaaacctacaatactaaaggatgctcggtttatgcccaaagatgaacagtaggttttgggtttcagtgtttatacagaaaagggcctgagcctgccccacacatgacccaagtacactgcataaagccagagttaaaacttcactgccagcctctgaacagaaggctgttctatccacactatcacaagacctggtggagttgaggcaactgctgaattaccatacagggaagaatgaattcaagaaaattcccatgcaagataggctcttaaaaaataaatttacacaagaaaatcagcactgtaaaggtaattgataagcccaatagaagggaaacctatacaaagaaatagaaataactaagcaatctgaaatggactttaaataatgatgtttacaattctctaagaggaaaaggagcattagcatcagtgaaacaaaagtagggctatagaaaaaacaatacttatgaaaaaaaccaattggaaatttttagatggaaaagcgtgaagtaaaaaattcaacacatggtctaaagaataaactgcacacagctgaagggaaaattagttaattttacgaagaaacaataaatctcacagaatgtaaagagataaagatatttaaataaatcagagttaagagatataaaactatatacatatgagtatataaatatccatatgtttatatgtatacatatatataccagaaggaaaggacagaagagatacaatatttgaacagatcatggctaagttttccagaattaataaaagacatgagcactagaaacagtcacaagaagtaccaaaaaagaaaagtccaaacttagagatgttgcagtaagacttcaaaaggtccaggatacagagaaaaatcttaagcttgcagagagaaaagacagattacccacaaaaaaaaaaaaaaaaaaaaaaaaaagagtatagtcagaataagagaagaactgttctcctcaataaccagagctgctaaaaaacaatggacaagtattttcaaagttccaaggcaaaatagctaaaccagaattctgtatccagttgtcaaaccatcattcaaaagagcagacaagaagaagatatttccagacttataagacctaaaaaagctaacttctcaggagctatcttggaaagaaatactaaacaatttacttcgaccagggggaaaaaaaaagaatgggatgcaaggaaaaacagggaccaaataagtcaacaaaacatgctgatatatctaaagcattatatgctttaaaagaagctagaacataataatgtcaaaaataggagttgatggcaagatcatgcaagagattgaagggatgttaaaatgtattaaagtccttgtcttcctagggaggaggttaagactactaactgcagacatttttaggaaaattaaaaattataatgtatattaagggtaaccaatagaggaaaagcaagaataaaaatacacagcttggtaacattttctaaggctctctagccctcactatctatctccagaagagataaaaacatcctgttaaaactacagatcttgctttatagtcacttatggcaacagtgtgaaatttcccagacagcactatattcaatcagttacattttatagtttttaaataatgtttaataatttaacagtaggataaaggaagaaggtttaaaataactgaataaaaatattagaaaaagcctatttattagatcataaaagtctatcaatggatactgttagatgatatatctgaaagttaaataaaactggatgaagccccacacaataaaagtcactgatggcatttggacaggccttccatgagagcagtggattaggcaatcaaataggtacatactcctgtatcttccataagtctgatggcttttttataaccatctttttaaaagtttcaatcattaattgattattcagctatgaataaatacatagatgaaacctgtgtatgtcaaaaagagacaaaaccatattttaaaaattgatatatggagaaaaaccaaatttaacattagaattttgaatactgcaaaataataatggtacttgtttctgagtgacatgattatagttgacattttcttttctaaacaaactttttaatagtttatacaaaaaaacacatatcattttctattgctttatcaggcaaaaacaaatgttttaaaattttaacattttccacatgaacccatcttataaggatttaattactaagcaattatataaatttaaagaagcatttcaaaatcctaagtaattcttctaatacaaaagtagttttaattgattggatattttaggtttaattattcacctacatgtataatattagattatgtaacatgttgcttattttaaaaacagggctaaatctgattatataaacttaatctcttccactgatacattgacacagttgttaaaacaataaagtctcaaaggagagaggaaaagttttaataaagaaaagttttaagaaaaatcaatttattcttaatctaaatagaaattaagttcaatttgatcattgtctagatttttataaactcaatgcatttgtccgtagaattcaggaatacaacttacttatctctctgttaacgcctgcattaaggtacctatacaatcaggcccctccagatttaataaaaacacttatttagaaatattattctcagatttccaactataacagggtaactataaggtttgcttagaatttgaatatacatgcctgggttgagttaagtacattaacatacagattccattctgcatgactctgtataatgtaatgaacactaacagacatcccatttcctatatctcatatgtagaaattacatccctagagctaaagactagaaaacagacatcagaatttttttttaaagtgaaaagcattttctaataaaattactgaaaggcattttacattcaagatataatgatgttctacttctacttaatatttttatctttatcaattaaaaacaaacaagaaaaccagaaaaacctcttattggaggccacgtttttaacccagctctgaaagactcatttgaatattgctaataaaaaatgtttacatgccatttctacaaattcttattattgcatctagctcaacaagcaagtctgcaattaacaacataaaacattctttcctatgccgttgacaagatttttaatgaccaggctagtcatttaccaacttcctttgcttaaaatctaataaagaattcattcacttttggctctcattcatgttagctagagtttttctcatcctcaagtagagaatgaattcaagattttaattagaaatgttggcttccaaagctatactcaagcttttatttttttaatttataattatgtttaaggataaaacactgtgcagaagtagctacacaacatgattgctgggtcagccacttactggttcaaggtctgtatcaaataattatactggctgaaatccacaagaaataactgataacaataatgctacacagtgcattagactttatttagcatcaccacatatgtcacataatgtaatattcacaaattgtgggaaaagcaacattatttatgatcctcattgtagttattgttttctcgcaggccaggatctacttccttttcctacagtgctctgatttccttttgaatattcacctgttactcacagaacatagacaagaaactggattcaaaaacccatctctcttacaagctggcagccttgccaaattagaccactcattggagtcctttctgtgaacttgatgcttgcacagagaaataaagatacaaaaaatatttagaggttttcatttcagtggcagaatccatatcagattcttcctgctacaagacctatcctgatctccaactccttggagatgccttgactactgtcccatttccaagtctgattttcctgctttcctttaattctgtgtgctcccaaacctattctaataaattttcttttgcctaagttagccagagccagtgtctgttgactgcaaccagagacccctaaaaacacccttttacacatcaaatgcataaatgttaagtaattacccagagttgctcaatgaacaagaaagtggtaatctcatgacttctaattcagtgttctttacactctgccacagataaagatgatcatacaacactttttaaatatagagcttggttttccaatggtaaaaatggctttaaagttcaacatcattataggagtaatttgtcctcaggaagaaatgaagaataatttaattttggatagttataagtatgtcatagaacttttagaaaaatgccactcatttccatcagcaatattttcagattgttataaagatataaacatattaaaccatatgcttcatatattaggttatcaatgcctactgttgactaactttcccaaatacttctttcctgaattcagatgccatataaaagaaagcaaaaagccactgtaaattaaatgaattgagaacactaacaacaataatggcaaccattatttaagtacttaccacacaccaggcaattcattggcatgtatcatacgatagtaaattctcacaacagctttgcagagtcagtgtcaatatcccattttagagagagtgaactgggacttacagatgttaagtaatttgatcaagttcacataaccaaaaaacgattaaaactattatctaaagcccttatttttttctgtgcataccatatataatctcagaaacactaaagagagatgtcagtatagagctttatccctccaattcccagaggcttagacaaagaaaacgttggtgaaaccattggactctatgacaactagaactgcataaatcataatcaatagaaaaactaaatttatctctagaatttggaaaatcacaggacatatatgttaaataaagattctgaatattacagtgattgaaaagacatttacccccacttaatgcaataatttgaaccagaaaagccttgcattttgaaaaagtttagaaatctttcttttaggtttacaaagaaaaagcggccttcattttatcccttagacttctgtgtcctccacctgctacattacacttcaagaaatttaacttatatcaatcaaaatttgcttcttaatggatgtacatctcaaactcaatagcccaccctttacaaacactgtacaacccaatagtgaaagcaaaaaaagctatgtagttatttctttaaaaccttcagcagttaagaagaaggagacatatcaaagcatattttttccatctggctccagaactttagttcatgggcaaagtatatggtatttgtattggcaaaataagttgtgatttcaaagcatcatctagtagcactgtaacatagaccatggtgctaaatgaggcatgctagtgaatatcgttcttgtaatagtatcaattgtttcaatatgtaaaactctgtttaaagctatatgttgaatctctactctacttttgggtgtctggccatccaaaaactgaatcccacaagttactaatagacttgaactgaaaactatctctgaaaatagatcaaaaggcacactttgttcaagatgtctcagggaaaaggtgacttctgctctcaaaaaaaaaagaaaaagagaagtgtgtgtgtgtgtgtgtgtgtgtgtgtgtgtgtgtgtgtgtttaaattaaatggctgcacaacctaatggagaagctgcccagacttgccatttggtgggggtgggaatgtgggaggtggttcaaacttattaggctacatcacttcagctggagctctgtctcgatggggatgctaaaatccagcaaccaagacttataccagtaaagtgctcaatgaagatgttctctgatagaattcagtcatatatgaggtactcatttttcctactcaattatttaattgctttaagtctcattttaaaaagtctttttaatatcttgaaagtttacgtaatggttattatgtgcaactaactataattctattccactttattttcatgtaacattattgaaaagagctcataaaccagattccacactcaaaaactcaaattcctttcatactgtatcatttgtttccatacccaacaaaattgtatcttccaccaaccagcctggctgcctaaatgagacttgtgggatgctatcaaaggatagcaatgacaagtgaatgacaagacagaagcttgtcattctgcctcttcagggtgggatgtgatttttgcctatccagaaaccagggggttcatgttacaaatttatattgtttaaagaaatcccccgcaaagtgattcgtggccaaaataattgctgtagctatcacattctcaacataagcatataaataaaatatatgcttacgcttagcataggcatagctggctgattgcatctgcatttttgtacctgcagctaattactggcccaaaaaggaggctaccatccgtcaccaccaaaaggtaggggcatggagagcaactgacacatgactgttctctaatatagcagagctccatctatgttgttgcatgaatagcagagattggagacagaaaacaaacatgtctaaaacaaaaatgtccaacttcctctatttataatctcagtatttatactagatctggtaataagtgcaaggcctactcctcatatactactatcaattaagataagattccattttatccaaagtatatcataccctgtaattctcaaagtagttacaataaatttaaataaagtcaaaatcctttcttaatcttagagcaggaatttttttttttttgccaacatgtggtattttatgcccttaccaaaggcataccaaaacatcacataatctaattccagttttccttgggtttatttcagctttattggtgtacatttgcaaatagaaactgtatatatttgaggtacataacttgatatacatatatattgtgaaatgattaccacaatcaagctagttgacatatataatcacctaacatagtaatcttgtgtgagtgtgtgtttgtgtgtatgcatacgtgcacacacatggtgagaacatttaagatctacattcttaagaaaatttcaagtatgcaatacaatattgctaactatagtcatcagtctgtccactggatctccagaacttagccatcttgcacatctgaaactttcagttttccatgttttaaaacttggtcaccttttgctggaggataagaagaaggaaaagcacatggcactgtttggaggccacatgtaagcctatctttcctcctcatcaaaaccctctgaaaataaagactctttctctgtctttatcataaaggtggaactgcgggtcttgaaaggctctcactgcctcctttaaggcgttcttgcctcacatcagtcagaggaaagagtgcccccacaggccatcattaacctgccaattctgcctccaaacaaggaggacaagagctcactaatttgaagatcaaaaacccacttgtccattatataattggaatgaaaggcaaaatgttgccgttctgaagagcacagtaattactagctgttaattgctctctcgtggtggctcacttttaattaaaaagaacagctcgttgcaggccgataagcaatggtggagaccactggtttaatcaacaaagcagaaaaatttgtttctgctgaagccaacaacagcttgagaaatcttcagatgtccaattgagattaaaaactgtctatttagtgcagtcagattttattttaaccaaggaaatgactatttgaagtcttccaatgtgagtgtccccgccacatccccgctggtgccgtggggactaatcacgggctggggttgtgatcactcaagtaaagaaatttagcgactttcctcttgacttcatcattcttgggtaattggcctgtctgaggtgagtactcttttttttttaaagaaagcgctttaaagtatggaaggcccacagactgtgcatttaattactgttcatatttcatgcagtcaaactgaatttcatttgaaaagaaaatgatttacctatctttaaaaagccttaatgttctgctttgttttgttttgtttttttcttccaggggttatatatttacatgccaatatttagggcaccaaaattaattctgtaagatgcttctctgtcttttcctctttcatctaacagccacagaatgcagctatacttaccccagggtgaggaggtagtccctggaaggataatactacatttagttaagaaggctcccaaggttaagtagagttacttggtcccaatttggctcatctctctgcctttgaacagtgtgtgtatctgcctcccatgcctcttttcttctccctcttttctaagtcatgatggttggaaagccatttgtttttaaaattcacatgttcttccacttaactgaatctcaggctatatttcagtctcgtccttcatcaaggaggaaacttcttccctcttcactaatcataagaaacacatatccctgaattgtctggataatattaaaaatgtgtctcaatcacaatgccagtgatatagactgttggtcaactatctaccctatacattgggtgttagcactagtcttcctgtacaaaatggtttatcactttggctccagtggtgcctctgaaaagatctgtcctcttgccagccactaaagcaaacttctctttctcctcagacaagtctttaagatacagcctataaacgcatgtaggtaaatgggtaatttaatttgggtaatgaaaaattaaccaattgttagcttaatttgctagtccttttctttgaaaacactggtgacgtcaggctgatggaggctggtacctccttcatgccttcattcctccatgccaatctacttaaaggcatacagccgtccctcttagtagggaatttattaattgagtcttgaactgacttttccaaattaaggtgtctgctttcagaaagaaggggtagggaagaaaaagagggttttatagggttttctttttcccctggcttcatttatatccaagaatagaaggcctacaatggtggaaagagcaaagaccaattttggtttaaatccccacttgctttttttttttttttttttttttttttttgagatggagtctcgctctttcgcccaggctggagtgcagtggcgcgatctcggctcactgcaagctccgcctcccgggttcacgccattctcctgcctcagcctcccgagtagctgggaccacaggcaccgccaccacgcccggctaattttttgtatttttgatagagacggggtttcaccgtgttagccaggatggtctcgatctcctgaccttgcgatctgcccgcctcggcctcccaaagtgctgggatcacaggcatgagccaccgcgcccggccccaacttgccatttcttaatacgtaaccatgagatacttgtttagcctcttaaatcacagttcaatccatggagaaaagaactcttttaagagactatttcaaaaactaagtgaaataacattttgaatatactatgtgctcaataggtcatagttgtacctaacatttggggctggcgataaatggatggtaattcaagaagggtccctccacattcacccctctgtatactttcaaacatggcagaacctggagaagaaaatcccacaattattttgttgagtattctctattttctcctatccctacacttcatcactgagcatgtgccattaattgttttaaccgctgtaaaatctggcatgggaatagggtgggacacagtaaactggtgaatgacacaaaaaggaatttgataggaaatttgcttctatagaaaggtgggagtgcaaaaaaaaaaagacaaaagagttattttctaaagtttaagcttctgaaaatttgcctcaggatgttaatatctaatacaaaagaagagtaaacacacatacacactcacacacacacacatgcacaaacacattttttgtgagactcttcttacccagcctgtcaatcctgtaaataagtttggtgacagtgaaataagtgtggtaatgataagaaactattctcatatgagcagcaccatctcctgatgcaagaaggctatgcaactagaaaaataataaaataaaattatttttttcctaaaatagatactttcctaaggtacgtattcaaagttgttgcctctttgatgtaacattcctttctgatcattctactgggaactattacatggcttcttttatttctcactgacaagaggtttttaaaacaattacttaacccagtggaaaaattcaatgccttagttaaacatattcgtcttattcttagttacaaaataagtgtgacgctatagtcatcctgcctatatacaatcatgaaatatcaagttctggagttgaaagagacctaaagagtcttatgcaaatataggcctttaaagttgctaaatacaaacaaattcaaggaacaatgactaaactctacactaagataaatgccgaagagacctgctattaatgtgcctcagggcttcatcttccccaaaagctcagtagaaaaggttccctgtctaagactagaacttggtgttaaaagtgaatggcccatttgtcaggagcaggctccaccagcagctcctggtgtgaccctggataaatcctgtcacttccctgatgtgatgattgatgttcagaagctctgaaggctcatctagcttgaaaaatctatttttctatcaccacttcaaaaaattttttgatcgtggtaaaacatatataagataaaatttaccattttaaccatttttaagtgtatagttcagtgacattaagtaccttcacactgttgtacgaccatcaccattactcatctccagggctttttaatgatcccaaactgaaactctgtacccaataactctgcatttcctcctgcctcctcccccatttcctcctgcccctggtaaccactgttctactttctgtctctgtgaatttgcctattctaggcctctcatgaaagtggaaccatgcattatttgttcttttgtctctggcttatatcccttagcataatgttctaaggttcacccatgttgtatcatgtgtcagaatttctgtccttgttaagactgaataatattccttttgtatgtttacaccacactttgtttatctgctcatctgccaatgggcatttaggttgtttgcacctttcgaccattgtgaatcgtgctgctatgaacactggtgtagagtatccgtttgagtctctgctttctctgcctgctttgcgattcaggaagagtccaagccgactcaaaggcagccggtcagcatcaggcttacgcatctcttgactcactttgtaccacaccaactaccagcagatgctcaaacaaatgtcctctgataacagaaagcagattcagtctctttggatcaattacatgttaaaccaaaatcctcttatagggtgggggcaatctcagacacgtgcaccgtgccagttaaggcaaaagccaagcaatgtgtatatgcacaagcttttctgaacacttacagtcctgtgtctactcacggcatccagatcaggagggctgggatcactgtaatcgattctcatcactgtaaactcctgcattcactctgtgattgggatgtgaagggtcgggggcagggagggagtgtccccccaccccccttatttcctgtttctaattttcaggcagcacctgtcaccagcagtcttgactttcacagttttcttttgagcctctttgcttttttctcatacttgttctaaggtttatcagaggaaacacttgccctcccaaggatggcctccatgctgtgacagattaatccaagttgagtgaacttccttcagacagaggacactaattattatgaaggcacttagaacacaatgcgagctgacatctcacaggccattccctgccaactctgcattgtcttaatgtcagaccctgtcagttcccagccttaattatatcctgtttacaaacattaggcctgacttcagatgaagcattaacaaaggttgacaaaggtcagggtcacatcgcaaggatgttatctgtctatactctcctcccgataaaccagaggtagagggctgatccgagagatagctttcagagcagaaaaatgcagtgtggtcactggaatatctaatctctgcggacacattttcatccaatctgctaaatgctgtggcagggagaggggggcaaatttagagggccaacttggtgctacttatcttaaatcccctgagggcagacatggcaaaggtgttggtaaaaacctctttcaataggaagaacaatcatcaccctttgccactgaatcaagaaactaattcaaagcgttaaaaaacagcaaccaccaccacccaacccctgttaaaatagggacctgttttaaagatgacaagcaagtttgaattactatacttggccttactttttaaatcttattattttcaaatgtttttatattagggtcaatgagcagctaagcagatttttcttaagcaaagcactctttagattcattttatatgctgaatttgtaggtatcacatcagacttgcattcaaattaatcagactcaggtttctttgaatttcagtaagttaaaacagtaattactatcacatacaacccattcttttctttaggttatgatcttagtgatcatctgccaaatctctatattttacaaatgggaagacagtggctcaatgaggtcgaagtatttaacctaactgaatcttacagcacagtggtggaaagttcaggctaaaaccaaaattctctccccctaatctaggattcttcccatacttgggaaattaaaccttttttaaaaagtatttttaggccaggtgcagtggctcatgcctgtagtcccagcactttgggaggccgaggtgggcagatcacttgaggccgggagttcaagaccagcccggccaacatggcaaaaccccgtctcttctttaaaaatacgaaaattagctgggtgtgatggtgggcgcttgtagtcccagctactcaacttgggaggctgaggcactagaattgcttgaacccaggaggcggaggttgtagtgagccgagatcgtgccactgcactccagtctgggcaacagagttagactctgtcttaaaaaaaaaaagcacaaaaaaaaattttttttaaagtattcttacagaagctgacatctatttactagacatctgtttaacaatttctataatttcccccatcagccttctctcccaactaaataacttagattcttttcatcttataagttcctgtctgccaacatgtaaattgctttaaatgttcttttctggacacactcctctaagtcttgaaattcccatagggcacacaaaagcactcagtagataatttatttaactgcttgggcctcatttgtttcttccacagtattgaggcttgtattgtgctaggtccaggtcattttcttatctgggtccagttagttgcaatctgttcgacaggccatctccctaaatgcacagcttgtgcaactgagttccaggtgaattaacactttttgaaatttatctccttcagtctctagctcctccctcatcccccaaccaccctaccataccctgaggccaaggccaagacttacttccaggcctcctacttactaacgctcccaagaaatttcctctgttcccagatttttgatttcttgccaccagtggacaactctgaattgttcagacttagccctatctcctcacatctctttcttcctcatctctgtgagaggcatctatagcacaatgttaactcaaatgcagtaagcgtaagaacaaatctcctccagggtccttctcccagtcctcccatcttggatagaagaaacaccgttctcctcatgcccaatatttacttcagagggtcctttctcagccctagctacttccccatagtgaccaactacatcttgttaactgttttgtccaaagtgcctgccacagaacctggaacatagtaggcacttataatatctgatgaaagaatcaattaatgaatcaatgaatgaataaacttggtgaaatcacgaagtcttgtctatctttctccacagcatcccagctcccccttcccacttcttcctgcagggccatctccacagcatcccagctcccccttcccacttcttcctgcagggccatctccatcctcaacactttcatcaccaggagtctgacttactagaaaccagggttgctatatcaactttagtttctccacctaatccctcctaatcatggctgggcacagacagaagctctgtacaaaaattagtgcttcaatcttaccttaaaaacagatcctttgtgacaattctatcaactattctaatttgttatataaaaatgtcaagtagctctaggcccgggtccaactcctgccaaatgtgacttattttgtttccccgggatgacaatgaaatgctgttaactaccttttgatgatgattctctgaacaggtgtgcaccccataacattctgtggtctagaccagatttcccagcttatggcagattatgtcatttgggacagattccaaggcttggtttaaatagatgtattactgccttgctgttcatgcatcaaccacatgcacacagtgaaggcagatgaatctgcccatcaagtgtgatgtggagctctctgatgacaaactggacttacggtaataaaattgaggttagagtgaaattgaactaaaatccctgggtgttatagtcctttaacttgcttcactcactgtgatgagctgcatagttcagaaggcaatagttactaatagtttaaaaagttgtgctttaagatgtttccattgcagaactgtaagttgtgtcctttttgtgtctgccagccagtggctggaatgctcagtccggaatttctatcaattagcagaggaaataaatgcagcgggtagaggtagaggaggagggagaaaggcagagagaaaaataaatgaaaaaaatgaattctttcctttaaaaccttgaggaggtgtgataaagctggcctttttgcatgcattacatatatattttagtactaagtacaatttaaagatggacaataatcatctgttatctgggtcacactgacacattaatggttctatttgtaagtcttaggacaagatcaataattgagagctttaaaaacaccaggcacacctgcaacctcttcccaccactgaaaaataactgcctgctctttttttcaggagatcattttactttctctgcatttgtaatgccagtcataggcacaacttactctcccatcagaattggattacatcagtggctagtgcatccagaaatacagacctaatatttcacaattgttctacaagggtgtgcacatactttactaccccaaaccaaaaagaaatctaattttagggggaaaggagttgagatggtcataagaaaaccatgtcggtaatctagcacatacctttacatttttgagtgtgaaaatgtccagtgcttaagtgaactccagaattcctaatatgcttacaacaagctgtttaattcaagtgcaagagatcttttctaagtaggaaaagacacactaacacaagcaacatttttacagttcttaagcacagagtcaaaaaaaaaagagagagagagacatcgttttacaaaataacttgtttttccacactcattctgccttatttgttcagtggtgaatggttgggggacagagggagtcggcgactaaaaggtttttggtctataaggagttggaagcatgtgaaagaagaggttttgaggatgtataattaagcagaaatcctcagcactcactaaaaaggaatcaaggtgaatggaggatcaactgtgaccacactgactactgaagccttgaatgccaaaacctttcctttcattcaggcatctggttctaaagcaagataattttcaattttaaacagtgctagatttgattgtaaaaatgtctcttgcatgcgataggacagttgctgtcctcattctcctttcctcagcaccttaaataccagccacatagcagatgcccgatgaatgttcacggaatgagtaaataacccctgaatgggttcaagggtccaaatattgtcttgggttctcctatgtgtcacgctttaaaacaatccctttataatatctgagagccagtatagttttaaatcaacttaccaacaatatacaattcaactcagaaagtaaatagaaataagcaagataattttctgccttactggtcaacaatcaaaaactttttagaatcccggtagacacagtactggataattctgcattaaaagaagaagcagcagatcaagactgtcctcagcagttccacccacatccaacaactgagagagcagttgccttctgagaatgacagtagggagctccaagcggagctcccacccaacagatccagcctcacctttcatttcgccacagcacagcagcagctctcctgtggtcctgcttgcaggtagagagcacatgaggggaaaaaagagggatctggtatgggattgtaccataggccagatcctaaggaacaatattattttatactcctatgacaatcccaactcactcactccattgtgtctgcccatgtttctgagcaacttggagctagccaactcctgtggggccagcagcctaggcaaatagcagtcatcatttattggtacaacgtaaatattcagtacagacatataaagtaaatattattatcaccattttactggggagataattaaagctaatctatttagcaggtaatggagttaggatctgaaccttggtttgtctgactttaaaacatgagaattttttttcaccataccatactacctcctgggccctatcgaagctgagattccagaagagaatgagttacacaggaggcatcatcatctgcattcaaagtaggcatcattttcagatgaagtcctttgtatatatgggcctaacaatttaagctcaaaagattaaaatttgaagacacctaaatatcacaaagtgacaaacattttagaagtctctcattccaccacatactacagagggaagcatctttgtaaaaatatcttgcaagatttacttgtacttataaaaataaattttacatatattaacattcaacatgtattaacattgcatagtacttttccactgaaagagttcaaagcatttttcaaataccaatttttttattcatctgactggggggaaaatgctgaaacattatggacaagctctaggaagcatctcttaaataatctaacttccttcttcccaaaataattcaggcatctcaagataaaatacacataaacactatgactagtcaaatagaagtccaaaactcatgagaagtatttaaggaaaaaaactcgaaaccttgacaatatggtcatttgagcactgaatttaatgttcaacttcatgaaaaacaaggtgaaaaggaaaagaagtatgtcatatataattctcattatctaataaaaaggacttctatggattgttgtttaggagactctgagtaagatattggataatgttttctaccactatttgatagaaaatacgtgaaaagttttcatacgacattacctaaactgaccctcaacaaaaattaagagtatctttaaacaagaaagcaatctgtttcagatataactctattttccttctacatagatcatatctcattgcttatactatgaatagcgtactcaatttctcccatttttttcaagatcttttagttatctgtaaatttttagcaataaaagaatgttcttttttttaaggtaacatctatagaccatttactactgtgtaaccaaagccctgtgcaaagcgtgcattctcttgactcggagactcagggctgtcaaacaacttaccctcagtaccatgaccacatgtgacagacccaagattttagcttgggtctttccaattccagaacccagctcttaattatctgctatagattctcttccatcacatgtttgcaggatttgcaatagttttatctgtgtttccaaagtcaaatagatatgagcgtcttcctggggaattcatattttccttaggtccattttttaagggcagacccacagaggaaaacgaatgctagttgcttctgaccagtcaaagcattgaaatcataacctaaatttaaaaaacctaagcaacgacaataaatattgcaacatgcaggcaaacgaaaaaggtccatgtggatggtaggaaatcatatactttgtggcatgagcaataggaactttcctttcaggtcactgatcaattcagtcagttgaaagtaatctattgtcatcatggataatattatagatgaaatccattggtgatcaaaaaacacctaaaattccatggatcatacaacaacaacaacaacaaaaagcaattaccatcatcattccccgggcaggaagctccagggagaccaagaagtggatgataaaggggccaccaccacctcttaaatcttgttgactacttccagatgagctttttggcatggggagggaatggagctaaagaatcttgcctagctgttagatttcaagtagaaattctcaatagttgggcttatgatcttctagtttcctttgtaaggtaatagatttatctaagcatggtaattttcttactacttttaagcagattgtatctctgaattttgtgaagacttatccaatatgtgcctaagcatgtagacgttttagactataaggggaaaaaagatattgctagcttgtcctataagagggagcagggaaggaaatgtcctctagggcttatgcattagactatttctaatagactatttttctcttcaactcagcctaaaacataccctgaaccctaaagtttttcgataatcttatgcaaaaaaaacctctagaatgactgctattttctaaacattacagtagaagaacccctaagccagaattgatggcagctatgtttctcacaaagacactcccaaaacaagaagagaccagtgaaagcccaaggatttccatccattgattcagtcaggaactgtggtaggtactagagattcagtaacttaaaaatattcagacacatttgagttcaaaaaaagagagaaaaaataagtaaatcgagaaatagcatttgcactcaaggaatttacattccaacagagaagtcagacactaaacatcaaattgtgcatagctatttaattaaaattatgttaagaaaacagttgacagggccgggcgctatggctcacgcctgtaatcccagcactttgggaggccaaggcgggctgatcacaaggtcaggagatcgagaccatcctggctaacatggtgataccccgtctttactgaaaatacaaaaaattggacgggcgtgatggcaggcgcctgtggttccagctacttgggaggctgaggcaggagaatggtgcgaacccgggaggcggagcttgcagtgagccgagatcgcaccactgcactccagcctgggcgacagagtgagactccatctcaaaaaaaaaaagaaaagaaaagaaaacagttgacaggtatagtactggtgttctccaatttaatttaaaggcacttagattcctgggggaaggggagcaataagatgtcggctagccaaaagcattctcctaaaaatgctttttaaaataaagtttagcagcattttttcctgggattatgaatctaacctccaattctggcaactggactcattgttgagtctgggcaccatattaagaatcatggtagccaatggcaacccagctcccataaattcaaagcttcatatatataaaactatatgtactgtatatttcactttaccccagttttttgcttgtttgtttgtttgcttgtttccttgccagcttcacattttacagattctcataataattctaagaatagctctaatatggtttggctgccccacccaaatctcatcttgaattgtaactcccacaattcccatgtgtcatgggaggaaccttatgggaggtgattgaattatggagacaggtcttttctgcgctgttctcatgatagtgagatcagtctcataagatctgatggctttaaaaatgggagcttccctgcacaagctctctctctctttgtctgctgccattcatgtaagacatgacttgctcctccttgccttctgccatgatttgaggcctccccagccatgtggaatggtaagtccattaaacctctttctttcataaattgcccagtctcagatatgtctttaccagcagcatgaaaaaggactaatacaaattccatcttgaatttgacaaccagagtaacaattacttgacttttctgtttcctttctacaacaaatttttaaataaatgagaatgcttctctctgtgtagaatcaaggcatatttttaaaagtagaaaaatatttgtccagtttgaaaaacaactgctatgatctatccagaaccttaaaactatagaatcatattatattggactttgagtaaatcttagaatgaatctcatccagcccttcattttatagacagagactgataatgtgagactttgtgaagacctcagccatttaacccttgagacattaaactggtgtgtatcaaagatatatgaactttgacatggaactactggctgaatggaacccatttaaatacacaaaattgtatgtaaatgaacagctatgtatagtcacaatcaaattagatggtaattcactactcttcaatgtcaggaatacaaagtagttccacaaacagtgtggttgtgatactgtggtttgtactatgtaaaatgcccaattcagtatctggctcttggcaaagactttgcttttaggaggagcccatcttaaaagatgaggaaggcagaacgagcatggcctcttgccccaacaaccacccactgaatcagatgaaacataccacaaggcaatttgaatttttaaaggcaaaacctcaggaagactcctttgcccatttgtttagttgctcactaaaacaaatgctcttgatttttgactgctcagcatccattctccaatcttctggcaacaacagccattttcctttagataacccccccttgcccattcaggcatgttgttcaggtggggttgactccatcctgtctcaccccagactacaacaaagagcacatggcctatgcctggccaatagaagcatttcatcccttgaccacagcaactggttcaaggttaggcacacgacccaagccaggccaaagtctacattcgggacttctgtggaaatcactgggaaagagaaaagcttttcttattagtttggagctgcccagaaccacagtaagaagagagatgatctgagaatgtaaccaacatggaagaaagcaaaagaacaagatagaacaagatagaaagagagtctgagtcttaatgacattactgaatccctaaattcaacattgctgaagccaaatgttccctgaaactcccagttacttctccagtaaaatctttgtcttttatttttcataagtaaatttgaattgggcatttttcttttgcaaacacaagtgtcctgatgaaatactaattttcccacccttcccaacctccctcatccttggacttccaggacaatgtaatgagcaccaaggatctgaactctagctcttgttccgccattttcttgagccacatcctctctaagctccaatgtcctcacaaaaaggggatggaggctatctttcccatttagtaacattaatatggatcttactttcaagggttttgagatcattaagacagaattaatgtcattaatacagaagctctggtacaccttggtaagtatgtaatgctttcaaaaatgaaatgccattattttcttggattatctcatttctcattttggttcttttatccttattcttccatgttattaaatacaaacacaggtcactatttaatgaattgtgttaccctattttctagccatttttataaaaacttaaaatcttaatctcaaaaaaaaatggctatgtggaaaagtgctaagagtgtgtgacttagtggctcagatgtgtagcaaaacaagctttaaagtccagctctgcacccaccccaattgcatggctgtggccagatcatttaatcactctgggcctcagtttgccaatatgttcagcgagataaaatcacccaatttttttgagttgctgtgaaattaaagcatatacacaaggtctgtcatatagatgaagctcaataaatgggaaggacaatattgatcattaatattactagtaagagtgccagaggcaatggggtcaactcggagaagataggtgaggctggagggatgacacagaagtaccaaagaccactgtggcagaacagcttgggtgagtatcaaagacctaggctggttgggtccagagttctggggccagagggtcaaaaacagcaggactatctcttcgttcatagcttgtaaacttccctactccttacagcttttgagaccctgcactttgagcttaccaagctcagggtaagtgtcttgattatttttgtatttctgtcctttaagaagtgattggtaaatgctcactgtgatttgaacatgatcatctcttatccaagaggaaaggctgcctttactttttggtgtccattcccaagaaaaagaaggccagacagagcccacagcatgtactttttcattggaggagagactttaaagttccatttcatgtggttaacccaaaatgttctcatccatctccagatgccctagtgtctccagaggtgtgaaggtcagtggtctgagatgtgtggatcagaccagtgcagcattggaatcacttgggagcttgttagaaatgtatgttcttgggctctttaccaaacctactgaatgagaaactctgttggtcagacccaggaatctgttttagtaagaactccagggattctaatgcacactcaagtttgagaaacactgctccaggtagcaccttaatgcagtcggctattcatatccgtgggttccatatctgtggattcaaacaaccacaggtcaaagctattaggaggaaaaaatgtgtctgccttgaataagtacagaatttttttttgttgttattccctaaacaatacagtaaaagaactatttacattgtattaggtaatataagtaatctagagataatttaaagtatataggagaatatgcataagttatatgcaaatgctatgccattttatgtcagagacttgagcatctgcagattttggtatccgtgaagggtcctggaatcaatccttcacagatacagagggatgactgtatacatgtttttgaaccctgtaagtaaaacttctagcatttccatgttgagaggcaagtggaagctacaattacatccttactcaatcatgtagctcatgttcatgcttctcatggaaaattatttcaaaaatatttgctaaatacttactaaacaaaaaaagtaagatcttgatctcagaccttaaaaagttctagtttcttttcttaagagaccaaagggtcagctgcgggtggaggcaccaatttccatgtattagtcatgactctaggttgcctttttggaggcatgtggagttaatatgaatcctcagtctatatcagacccattattgatataataacagacttagcatccttctgccttggttcatagtgagcaaacctacagctttaaagcacagtaggtttaaactcttaagagccaatgtatgataagtgacctcagaaaagtaagccagatctctctagacccactcagccacgaccaggtgatctcggcatcagcactaatccaggtatattagtcctgggcatttagaaaagattatatgtgatcatatggatgtaaatgtgagaaaacaatgtaaggtaacagtataaggaatagacatggatggtgtgtgtaactcattatggtaaaagaaaccaaaaagaatagttaggtagataatcaatcttctgatgtgtgtgacaaccacctggcacttggccagattttataagtagtgctctgaagtagtgaatgtttttagtaattgatttacacaatttaccccatacctgtacacacttgtaaagaaccagtatttagtgccagatccagcatctgaagacttaaaaatagacaatcctgattagctgtgtttgcaagacttccccaacataacagatgtcaggagacgagtatgacatcatgttatagatgatttttgtaatgtcatcactttgaaaaattaaaattaaggtcagcccagtggagatcttttatcttttctttttatagaaaatgaacaaacaaaatgtgatgatgaatatattaagtagaaatgcatccaaaagcaatttgcccttccagacaggctcagcaaaacaccagcaggagccacacaaacacttgggtactggaggcaaaggacaataaagggtcttgggaagtgcctctgtcctcccttctggggcctataaagagaagcctagtcctttcaagcagtttctccagattttacaacctggttctgctggttgggagagaggatcctcaagaagaatcagtgcatgccaatggcattccagaagatattcgccatgaaaactcactactgcaggtaattttttttttttttcctaagagagaacttctctctggagagagaggaagataggcttaatttgtgcttttacaaattacatactgggttctgtactgcaaatgtgcttaatgaaagaacagatgctcacaactaccacatcgggttaagtacttaggcactgacatggaagcatgaagggcccctgtgtaaccattcccaaacttctttaggctgtttattatctatgcaatgtaagaaatgttttttaaccagaacccctaagttgccaaattagcaaataaaaatacagggcccagttaaatttgattcttcaataaacaagtaatttttcaatacaagtatatcccaaatattgcatgagacataccttctattatatatatacacacatatatatatgcatatacaggtatgtacgtgtatgcatgtgtgtgtatatacacacatatatacacatatacatacctgtatatgcatatatatgtgtatatatattagtgtaatatatatatgtgtgtatatatacacacatatatacacgcacatacacatacatacctgtatatgaataaatatatacacatacatgtatgtatatgaataaatatatatatatatatatatatatatttgctgtttattttaaattcaaatttaactgggcattctgaattttatctggcatcttatccctgaacctatcaataagaaatttctctcttggaactaaatattagcccaggtggaagagaatataggaatgtggaaactaaactttttaatgtgtacagggtccttactttacaactttcctgtgaggtaggaccaaagtctttaatcctcactttacaagtgtagactctgtgttaaagagttgcgaaataaaagagctgggattcaaatcaagatcctctgacagtttgcagaggactctgtcaatcactacactaaacaaacttaaaaaaggaagaattaaagagattggctagaaagggctgctttagcaagtagaaatacctggtgcaagcatggacactcttttctgttttcacgcctaagtaagcaatcatcagtctatgttcttcacaggctaagagtggccattaagaaatgaaagcaagtttagatttcaacagcatgtttggatttgacattttgcatttcaagaaaccaaggtcagctcaatccttttagcactgggacccagataccaccatgatttaagtaaacaacaaccctactgaatttaagggtaagtggtggagtaattgctcatggcctctcttgctttaatttggactatctttatttctaaatccattaaggagagcttcgtttcattctgcaaaacactagtaagttctgtaatgagattgaatttatccttgtgaatactgtcagagaattaaaaaatgagtatcagaaataaaatgttaaccttctcaacattagctgtcttattttccatctccaagcaatgctatagcctgaagaactcttaggttagaaaattatagaaaactaaactgcatacttgtttaaaaaaaaaaaagacatattgtgagattaatctgtccctgataagatattccaaattcaaatctttctctaatcttcctcaaaatcaaatactaagctatatttaccatatcaagaaataacggagtttctaatatcacagaaacaaacttatgtttctcatctgtttattcatttttagaagctgtgcaatgagtaataattgcctatgaaaactgcctgtgaagaatattgtcagaaattccaaactgctccagagcggtggcaagaaagtccagagattattattgggtaatgacattggaaataaaaaagtatatagtattacagtattgagctattagagtaaggaatcaattcaaggagacaagcaaaatttatatactttattgattttaaattttacatgctctgctatgtgagtaaatctttcgtagtaattctaaagctttgaaacattgtaaataacagggactgtagggagttcaggacagctattttttcatactgagagtatatagcctttaatgcatattagaagaaattggagtaatgaaataccttaaagctaacttaagtcagggttgacatgttttgtttggttttgttttttgtctccaaaaagagagcacgtatcaggtagtgaagtaattccaggtagcattctacttaaggaaaagcatattaaattgatcttactgtattacataaatccaacatatcctgtgtaaactcagaaacaggtggctctttgtaaaaggtggctggatgcagccgggcgtgatggctcacgcctgtaatcctagcactttgggaggccgaggcgggtggatcgcctgaggtcaggagtttgagaccagcctggccaacatggcaaaaccccatctctactaaaaacacaaaaattagccagacgtggtggtgggcacctgtaatcccagctactctggaggctgaggcaggagaatcgcttgaacccaggaggtgaagttgcagtgagccgagatcatgccactgcactccagcctgggcataagagcgaaaaccccatcttgaaggaaaaaaaaaaagtagctggatactaaccaatagcagtaaagttttctcacacaaaaacaaatgcactggaggaaaacactgaaacaatagttgactcaggattccatcaccgagaattagattggatttgaaataacccttctatgttcaatgttgaattgaaaaacctcaacgttgggccgtcggagagcctttttccagataggcgtttgagtaagccagtcaggttcctggacagtgccatttgtattaaaaagatcagttttggtcatttgtaactttcaatcatatatataatatacaaaatgacagacatgaaggaggtgggaggagtttgacatttttattgcaatgaggcctactgacacttaggaaaacgttttgacacattcaagtgtgagcaacaaatctgtccactgattcataaaccacatgtttacttaaagaagcctggtccaataaatgaggatcaaaatttcaagtgcttaagtccataaaattccctaaagtgaaatagtgtcagcagaacacattttgaccttcttaagatgagtaaagattttcaaataaatgcacagcctgcttatattattctcatttctatacaatttgttttatttttttgtatctgtaccctatttttttttaattctgagaagccacaaatcaacttttcaatgtttaaacttgtatgaatatgtgagtgcagtactcaggtaactaagccctgactactttttgcaattttgacttatatttacccagagcatgtcagtatgcttgtttggaagccctattcattacaaaggtttatttttttttcttgttgtgccactcctcacacactcaaagctatataaaataatgattctacacatttgcaaagacctaaaggaaatgttggtgatcctaaaacacatcacagtcagatgaaagaaaactggttctgtatttattaaaaagagacgagtttcgtatttcttcaggcttctaatgtgagctgttaagaatggaaatcaaagtcactgtaactattaacacttaaaagtgaagcaatggatcattacagtttcttaaaatggaaaaccttctcaaaactggatatttcgaaccaacctaccaggctcttatgctggccaccagcataggcaacctttgtatgttggagaaggagggggaggaggaattcctgttagcagagggaagtgagcaggaatggtataggagaaaaagaaaagaaagaaatctaactcaacaaccttgaaaagttaattcggaaactttcgttagtgactttggacttcattaaactccatgtatcactatagcagcatgatctcaacagtttgaaaggtatttgtcatcagcaaaagaaaaacattatttttaaaggagtaaagagattgatgcatcactatggactacttaagccccacgcagtttcagtctttagtattaatctaaacgtgatggcttttacatacggtgcataattaaacattttcttttcagggctttatagaatccccatatgtttttaatggcatcatctgaatgtttttcttaataattctggcagcctgctcccaaatcttcatgtttgttttttgttcctaatatcttttctacagaggctgcattgtgccagagattgaataaagctctgagggcctatggttagagaagacacacacacagacacacacactcacattctgcttgctcctctctctttatttgcaatctgtattgctattggcactggaaaaagatatgtgagagagagaaagcaaggaaaaaacacaggagcctgggtcacagcttcactccaccactgtgatacgggctctctctcttctttggtaggactttgctaactgtgtcatctgtctgtctatagaagtttgatgtgcatacttaggcgtgtgcatgccagtgggatgggttgactttggcggctgcaacaaatggtttccctgacactctgggggtgaacgtgccatgatttgctgactccatacctactgcctcatgggaacagacttcctcctttcgagcagtggtctattttctgagccaaaccccttcagacatgacccataaaacggaaataatgaaatgttcaccatttggcttaggcaaattttgagttgtaaatcagaatcacttccatttcagatgatataaatgtaacccaatgatcaaacatatatacaagagaggacatcgggatacaataataagctgagactctaatatccatgtctacccaggattaagtgcccatagtctcaaacatagaacataagagcctctacttgaagaatgagtaaatcaaagagaagaatgtgccccattgttgttcaagtgtagcttgcatttgctttatcccaacataaatttaaattctggaaattgacaaagataataaataactcacatttgaatcataagtctcctttaaattgagtgtttgaactcagatccaagtttcaaaacataatatttttttaaaaaggagtattctcacattctttccatatttgtcatcttgaaatctgatgatgtgaatgaataaaatggaaatagtaactgaaacagcttccttatgctactttcttcattgaacttcatttatttacagatggccaagtggctgtaaaggcatttgaaactctcctattattaaaaagttagatttatcaaaactttcaaagaactggtttgcgtttcagaattccacagatgatgtgccttaaatagaaacaaccaccctggaaaatcttaaaacatttgcaggcaaacaagagcagaaacaagttatccaggaaggggaattctatggctttctctggtacctctaacattcgttgttggaacttgactaaaacaacaaataatctttaagagcatctcttaaataaacaaaaacactttttaaaaatccaaacctcacttttttcccatttgaattgctgtaggagaatttataatgtggcaaacacagttttttaaaaaagggaggttctagaaataaagtgattgaataaaaattaaaaataaggcctttaaaaaaaatcaattgacattccctgaatccagacaccacttcagctgctgggtctcctagccccagtcaaaggaaggagctgccagagaatcaaagccacagggtctaataagctcacaatccaccagggactatcacatcagaactcctaccagctgtgcaaccttggttaaaacccagaaatacatttcttgaaaggttttgagtcatgaaaaccagcaggacaataatagttttgatcttctatcaacaatttgattgagggaccttcccctattcttccagagcaaactgcatccatgaaaatagcttgatggtatctccacatttgaaacaactctcccgtttagcttgctaacaattgccaaggcttcccatatccatatcctgtagcatttaccaccacaagcccaatacaaagaagctgaagtaacagccagtttgacatccccactccccagcatttcaaaattggttagtaaggatgagatccacctgtagatctaagaacaattccaaatcacagcaacgaagaatttgaaaagtcctaagccaggtgctagctgggcctgattttcatgacttttctttgttcgtttgttttagtaactgagtgctaacctcaccccttagaataaagacccagcatgcccaaagcaagtaaatagattccctgctttgtactggtccagcacccaagttcctctgggactgggcctgccttctcttcatcttcttccatgcaaccatttggaggatattgccccatgtcagacactgtgttgggcactggagagaagaattagaataaataggacacagtctctgctctcaaataactcaaagtagaaaaaaggacatacatattttaagtacagtacaatatgataggggttatagcagaggcagaaacaaattggtatgaagaacaaacatggggattgctaactctgctggggaagaacctagaaaatttcacaaaacaggtgacatccaaggtagcacttaaggctattcaagtggtagaaaaagcagggagtacagaaagaaaggcaaggagggctttctaagaagggagcacagcacataaggctgagcagaggttcccagttgatgtttacatgaatcacttgggggtacttcttaaattgcaaattcctgggtgttactcacagattctctttcttttggtctaactcaaggacctggagtgtgcatctttaacaaggaggtagatctcaggttacactttaaaaagcaactggccagggtcatgaaagcgcattatgtgtttgagggatgcaaagcaatttagtataagtggagcatagatttgaggggtgagaggtgaactgacagagctggtcaaccaggtccaagaggaattatggagtctcccagccacctatgaagccctaaaaatgagattccaggaagcttcagagccaccctcagagctgcaccagggcttggatctagtctctatagctgcaaccacttgggtgtctgccgcactggggtgtcagcagggtagagagagagaggaggagcgtagacagcctaatgtttcaatcccagttctgctacttactgactatagacttggcaattgattaaccatcttgggcctcagttcttcctctgtgatgagaataataactccaaaatgccaaggtcagtctaaaggttaaatggtataatgtccatgtaatacctatctcagtactttactcatagtaatagttttaatagtaaaaatattacctaccatttattgaaaattcagataagcagcaaaaaaaaaaaatgatttcaaatagagggagtcatgttttgcctgcacgacaaagatgtagaatttcgccatgactgagcctctcctgcaggttaccacacctaaatgtcacctagctgtcagcacttcagatagacagaccctttgcctattttctagtgtgggtcccatccctgatcattagcctttgtctagagtttagagctccctggtctgacataccttcccaccatcatcacctgcaaacctgacagctcttcaccagttctatatttcctgatcatacacaataccaaactatctcagtgccattatgacttataagggttggcactgttcctgaatacaattaatttatctgccaaagacacacttaactgtttcatgaggctcctgatctctctagcataaacaaaccaatgcagaggaagagaagccctgatactgaggatggtgaataactttatcctgaatccttgtctcctcattatattaacagtaacaaaactctaaatttaaaggatactctggagtttcaagatatctttttccactgtctctcatatgaccctctccataacctcatcagagaggcaagacatttttccccattttacacatggaaaaatattgaacctcagcgaaattaaatgacttagtcacatggccatcaaactacaaagacctgaacccaggcctcctaactcctggtacaagtgcgctccaatattctacatctgccacctctcattttctgctaaaattgaccttcagcaggagagttaatgactactcatgggtccaaacccttccacacaaatggttacaagtcttaaatcacatgaaaataaagcctgtatagcagtaaagcctaaaaatagctttattaatctacttctgaagaagggattaattctaaaaacattacagaaccaactggattcccttttgtaccaattgggagcagatttggagccacagctggtcatcatggtataggagaaataacaagttttagatcaaaaggatctgggttcacaatcctgacttagccactccgctggatgcatcatcttgggcaagttcctaaagttttgagtccaattttttaatccttaaagtggtttgatcacttctaagctcaagtgtgattatacaacaataaacatcacaagcctagcttggaaatcacatagaggcccttagcaattgttatcccactttccctagaccagtgttaccaaactttaacatgcatgagagctcgttaaaacagtttggtgagctgccccatgctcagagtttctgattcagtgtgtctggggtggaacctgagaatctgcacttctaacaagttcacttgggtaaggctgatgctgatgctgctggcccagggatcacgctttgagaaccaccactctcaagccagacaaaggtgtcatgcagacattgaaatagaaatcactggctagaaatctctaacctagaatggtgatgctaagctactgggtgtcaattgctaacaagcaataccagctaggaaaatagaagagcaaagacccataatcctgactccttcatggacttatcagggtcagaggattccatgctagatgagcactttgtctaagaccccttataattaagacgttcagaatttccgactgaaggacctcccaactccacttctgggaacatgctgccttataaatagcctctgaaaatccctgggagcacctagaccactgcttctgtgaaatccagcatgaatctaattgaagctgcttaatcgaacaccaagttgccctcagtgtgatttttacatcgctggctcctcagttgcttccccacccggccctaccccacatgcacacacaaatatactgaatctgagagtccttcaggagtgcaattaggacagtcatttaagagatgcaccagcaatacctcatttttacacatagacatttttctgaaagagaatcatggattttgcttcttaaagggaataacaacaacaaaaccccagaaaatacgttaaccctattttatgaaggtggtatagacagtatatcctcttttgtttctagatatgaagaatacataaaaatgtgatgaacaggcactggcatatatatcaccctattcttgtgaagaaatttgtaatatatctctattttgctgcagccgatgccactgagtcatcaatttccactgtattatccaatgttctgcttggttggaatattaagcagccatcagattttgaacttcacgtttcctcacatttggcccttcactgatcaagctttgtttctctgtgattatagatatatatcagaccccggaatcaactttctttgttttatcaagacctggtgtgtagtaattctgatttatcatttttacaacagtctcttccctgcgggctccaggtcgtgatggtggcattgctacgatttatggtggggactgttgacggaaaatgtatggtctttttgattttccttctttccaacacctggttcttattttcccaactctagcttctgccattttaagcattatttaccattcgctgaaatgcatgggtctatttggagggggacgtgtaaggtaaaggatgaattttcacagttggctatgattttttcctcttatcaatgacccagtgctgatttttttttttttttatttccttatgtcgttgggggcctggagttcatattcatttctcacttgcttcttcttatctgacacgacttattagttctctgagaaggaaaaagaaaatgcaggctgggttaagttcctcacagaggtttttgaattctgcctgtgattcacgctgtaggtggtcacctccctttccaacctggataggttatttattacttactgaaggctcctctctctccaagtcccagagcaaggctaattttctttagagtctaagaagttatttcagaataacttggcaaaaggaagagtttttaaagcctgatagtaatccattttatttaccaatattgaagaaaattgtaaaagatggggatgaaataagtaaagttgctcacacctgagaaatgtttgatttttgaagactaacgtttaggtttccctgccaatgcaaatcaaaaaccaatcaaagctgtttttctaccagagatacctagagtgcttccactgtttttttgcctcctctcctgcacccagcagatgcactatgaatttcttataaaaattgatttgtatttcctcttttaaccaaggtttcttttgttaatctgtatacttttccaagaggccacgtagtttgtggtagaattcaaataggaaaaatacttaacatcccctccatctgtccttctactcattcctaaaaatagaagtcaacttttcagactaagatttttaaataaaaaatttgggaaattggtcaattacatatgctctggtagagatagctaataaccccctggataaagcacccagacatactgattttcccaggacagttcctgtttacgcttagtatcccagtgtaatcagtggtagtggcatctttcactgtcataagtgtgtcattttggataaaaattatgtggtcatactgtcctgtatccactccccccattcttccttttattaaaaaaaaaccctactgacttttatttgacaggacacttggctacccatgtagaaactgcatttccagtttttcctgcagtctggtatggccaattatttacataatgagcaaactcgtagtgcttactatttgccaaccactgtcttaggtcctctaccaactaacacatgcaatcctcatcccatgagcaaggtgctattctccccatccctattttacagaggaggaaactgaggaacaaaaaggctagaccacttgtacaagtgggatgtgctgggatgagctgggatgtgaaccccaatggtctgactccagaatctgtgctctgaacctgctacctcggagtgtgaccaagtttcagctgtgagaggaagttgcatgggcaacctctccatttagtcccgaaagggaaatgtcgttgtccccagttctttcctttctctttcactcaaggaggaacagggacttggtgctggtgaacgcagaaacaactctccaggagctggagaagccacagacagagggatctgaaacctgggccaactttccctgaactgcctacctccctctatctaagccgctgccagcctgtaccttaactaatatgcatccacatccccacctcaccaagtcccacttgatgcgaaagcctaggcacccattggagtcaggcaatgggaagatatatgtgaatattctattccagtatcaaaatcaatcctcttgaccagaaacagacattccatcccattggccccaagagtcctattcattctaatagttgctcccataccatttttgagggatatttcaccctagttctatatttaattctagatacatagaaaaaaaatccatgaaaggcaaacatgaaagaaaatataggtagagacatgcagcctcagcccttactttcaaatgtctaggtgccacctgggcctcttccccatcctaaagtcgttccagagcaaagcactcaacacaaaggccttcctttaccactgtatgaaacagaactctctaccctagccttgtggcatccccttttctctctcccctccttcatttttctcagcagcactaaccaccacctgatatatgttaacttcttcctttatttatagcctatcccatctggattataatctcactggagaaggaactgtgtctgctttggtcactgctttatccccagctcctaactgagcctgatatgtcgtaggcactcaataaatattgattgagcaaatgaatggagaataagcagactgtcaacagctgtaactatgtgacttttgggttacttaacctctctgggtcccatgataacagtgtctaatagggttgttgtgagaattaaaagagatcatatatgtcaaatatagaaactaccttccagtacatggaaggcccaatatcatgttaagaataacaactaatacagtgctcactctgttcagactgtgctatgcactactgtttcatttaataacagcccatgtgtttagaatcacccaccttctggtaccataacaggagtcctggttcagccaccactgaaccttgttctgtgccttgccttgttctgtcctctttctgggatttcctgagacaaaccagacagcaatttccagaggtaggacaaaccccaaccttctttagtgaaacccaggtcaggagttgctagaactggtcttgcctttgataaacacagcaaaatagtattattttaggattaggaccatatctggtgtaaaagttagtggatttggagctctgtttgttaaatgtctctccttttttttttttttttttttggtattcctttaagatcagcattggcatcttcccactaataacctggggtatagtcaacttattctttctttctggacgttaattcagcagaccctgaatagtacaagcagaccctgagactgaatcctataatctggaacaaagctactatgtctgacacctagctaggtcataagacctctttccaaaaaaaaaagaaaaagaaaaaaattagtggagctagagttctgaggatagcagatgtttaaaaaacaaagtagcaggacaacttccaaaggggaaaatccacactcaagctctgtgatatctaactggccacttgcaatggatagggtctccttgcccaacctcatgcttcaagacctcagctccttttaattttaacacttaccaaactagaaatgatctagaggataatgacaataaatagtagcagcaggcacaaatttgagtgactaccttatacaggaactatgtgcctgtaattgatttttctaacattatttttcaatctcacaatcctaaaagtaagctactattatttttgttgttcttattcctattttatagatggggaaactgcagctctgagaagttgttgctagcacccaaggccccacaactactgaggggcaaaatgaaaattctaatccagatctttgtaattcccatgcctacaccctctccactggatcttccaacatttagccccttataattcctatgggcaggacatttcacacatatatttctggacacttcaatactaaaatgtgaaagaactgttcaaactttacccaacaagaagaattatttccccatgggacagcctctggaatgactgtatgattccattactcatcccacaaatgtacctgcagttatagtttcattctgtggaatgctggggaaccctgcctgtatctctagcatagccattagtattagaaatgtcttactagtaagctcctctttgtattttaccatgtattgggtggctatttcagaatgggtcaaaagcaaacaactttaccttatttccctgaacctcaacgtacacatcctctgattatacaccggcccagataaatgaaatcagagacataaaagtagattcatcctgaaactccctaatctcataagtagtttttgttgacaaaagtttttgttagtgaggttccccctcaaaacctgccaatgttataattgacaggctaaagttagtgtattccaggtctggacaattttaacggtcatccccttagccctggtttaatatacagtgctggaaaacaggccagaaagtgagtatcttagatatactgatatagtacatgcagcagaacatttaaaaaaaaaaaaaaacttacccaaggaattcaaatcctatcacaaatgcctttttcttttactttaaaaacaaagtaaaaaaataaaacttgagtacaaaggtggccaggcttggctgacagggttgataatactgggatttaacaacatggttgttcacaacctataaacctacttctattagttttataattataaaacgattacccccaaactctatagaagtataacctgttggaggctctggcttcacatttgcattatctgaggggattttttaaaaaaataatgatacctggggtcctacccttagaaattctgacataatttgtctgagatggggtctaggcatcagtgctggttaaaagcaccccagttgattctaatgtgcagccagtgctggaagccattattcttggcaactctctattgagattcagccacttctctgtccccatcacatagctgtaacttgcctccagtcaaataaaacttcagataaaatctcttactgccgaatttctttctcttttattctaactggtgtgttcaatttttgcctaattattcacctactttcttcggattgggcccaaggtatactttttttgtgacaacccaaaattctctccacactatgacaacactaattcattggataatcccttaaaatatcacacccacttttattgttcataaatggcaggttagagggacatagattcacttctgactgatgactaagtgaaagcaagtgactacaaattccctatcctcagtttgcaaaacagagactgtaatatttaatatttttgaaatctcaaaaaaactatagtacaacacaatctgaattcaaatcacagtcttctgtcaactgaattcgaatcacaatctgctgtgtgacatttagcaaatcatgatccctctcagagcctatgcttactcagctacaaagcaatggatttcttcctcccagagtagatgttgaggctaggattctcttgtaatgttgaagaagttctgtatctaaagtcaggagtaactaactactggtgagtgcagtgacattaatcagttggtggtgcttgaaactatattctcttgccacccaccaaaagagccctattcaaattttgttcaaagcaagagaagaatagagttcttacatttcataatcagggaaaagtaccttcactcctcctttgaaagtcctatatatgtacttataacacagagaagactcaagtcctgtaaattagacatttatttcagaatttgcattttcactgaaataaatattttatagattccaaaaaaaaaaaagaaatagagggcacctgaaacaacctcttcatttattcttctatatacatatgaaactagactatccaggaaaatatagaatagctcgttgttctttaaatatattagcagatgggttttagcaacttcacttgatctaaggcttccatggtggatttgttgagtaatcttcactcaaatcaacccaaattctgattgtgctagtttcctctcagaggcctatgattcatttgcctgtgtatcctcaaaagattttattaatactaaagagccctgattcctttaggccttccccataggacctcaacttctaaaatttcctttgaacctccaccaagctccacaaatttcctacctctgccttatgttttagagtctcttctgagctccaggacaactgcttctaagacatctcctcctggacatcaaactcaacatgttcctgccatgctatcctcttccagtgtctgtctatgttcataaatgtcaccaccacccactcatctccacagtcaaatgttcaccaagaactttgtaccctaaatatgttgtgaattcttccacttctttccatttccactatccccagtgcaaagactattctctttggatactataacagctcccagctgatccctcaagatccatgctctgcccagtagccagagtaatcttttaaaaacgtatatcagaccacagcactttcctatataaaacccatcagtgactcctcagggtcctcataataaagatccatgtacttaacagggccttcaagatcctgtgtgacaaaaccccctaccctctacagtcaaatcaataatcacaagtatgcaactatagctacattaagtgctatgaagaaaaatgaagagctacaagagtgtaaaaagaaggactctgaaactgccttcctattttcctctggtggagctctttttgcttcatggctgaatcctcctctgtttgtcccataaatgtctgcatgccagacttccgtccttatcacactgctcttctcatgtacgctctctcttcctgtgccaaggactcccacatctgaatcttcaggcctcattttccagctgcctcttggatatctcccagatgttctgtaggcacctaaaagggtgcattcccaaccagattaaatgtctttctccaattcctcttctgctgttacctctcaccattcacctgaactagaaaataaacacccctgagatttttttctccctttccctcactcccacaaccaagcaggagttctggcattctgccttctaaacatcttgtaacttggcatgttctccatgcccaaatgccactacttttgttcagacatgtgttatctctcccctgcattagggctgcagtctcttccctggattttttgcctccagtctcccctaactttgatcatttgctttgctgccaccatgttcaatgtggccatgtcatggccctgcttaaaagcttctagtgcctttaaaataaagcccacattcattagcttcataatcagatcctgcctatctctcctctttttttttctttttcattcattcttttcacaagtattcactgatcacctactatgtagatggagcagaaaacattgctacatttattaagcccatccccaggtgctgcaatatacccacacatttggcctccagtaacttgaaatctcatcattttctgcacatttcatgttctttcaggctttcatgtaatacctccatgggctgcaagacttttccttcctctcaaacatatttgtactccttataaagactcaacactcaaatgtaacctccatgaagccttgtgagagttccacaggcagaattaggcacactccttggcacatcaaaccactttgaacacatctcttccacacatctgtctccatcactaaactgggagcccttcaagagcagggtaccatcttcttccagtgcatatcctgaataaatgttactgatcatatgaatttaaaaataaatgaaccaatccattctatttcatctttgagagcagcagtccacaaactgtaatgtgcattagaataagctgggagtcttattaaaatgcaaaccctgatttggggtgagacctgagaatctgtatttctaacaaactccctggggatattggtgtgtgggccctaggactatactatgaggggcaatgttttagaacttgatcatgaaacacacaaagggagattagttgagaactgagaactgttcttgcagaaattgaacaaaaaatggttcagtttcacatcttttctatcaaatatgcatgacatcttgacagcaaccactttctgaagtgctagagagaaagagtcattgttgtaacccttcctcagttggaaagcccacccttagctctccagatcctctcagaagccctgactgaagctgattcactagccttgcttgttgcagaagcccgatgctggcatttgtttccaactctgcgcatggctcgaatgtgctcccttgtcatctacagcatggatgcaggaccccaaatttccctgccaagagttggtggcccaggacggctcagtgcctctttcaccttccctgttctaaggcaacagccctggctgccattccggatgccccttttcaagccgtcctacctcactgagcgaggccttggcactggctctgctgcattgtcctggccagcacacctcttatcagcccagcatcctctgtgctcttgacagtagcctgcaaagactcacagaactgcccgaaaggtgatcccagttttagttaaaacttttcctaccctcagaattctgagatgctactggggatttacaagttgttttaaggctttttaaaagacaaacccacggtatttacatagatatatgggtctgtgtaaagtactgtgcagttctttataaaaggtgtagtataaatgttcttgtattactagaaggattatataaaagatgttaaaacgtatttctactaagcagtgctatagatggccacagaatataatgtatccattgtaaagaaatccccaccagagacctctgaaatcttacattgattgagctgtgctggacctaaaacgcattgaaagttttccaagtggtaaaatattaaatatactcttttttaaaatatttaccagttaaacactaaagtactataactggctgacctttcacagcagtttttgttctacttttccaaaagcagccaaaaagggattgttttcttttaatgttttgttttgtcttctagaaaaaaaaaaaagaacagacttattttgagcaatacgactcccccctccgcctatgcaataacatcataatggcagaataatcactgtaaacaatgccctggggatttagttggctacaacaggggactctaggagccaatttcagtgcttttcttaactacatcattgcatttttgtctgcaagtggataagaagagtctccttttagagcaggttgatggaaagtgctaattgttgacacattagctaattgttatgattagcccctgacttcttttttattctggaagtcaagatctcaactgtgaagtatgaagatgctttatggcaacaatgttatgaaaacattcaaacaatgagaggctaatcttcagaagcattcaatccggtggcaactaaacagccatgcctttaaagaacagacaactagcaggaaaaaaaaatatcctaactgctgcatccacccaatatttcagacataagtattctggggttatcattaatgatctgtttttacaaatctactatgtctttggaaagttgaagcaactccaaaccaaataaaccacacgcaagccataatggtccactgacaattgaggcagcttggaatctgtgataatatgaacttgtaaagtgccacaattagatgtttctctattttccgaaagtcaacatgggatatttgaaattgggatcattctcaaccatagttcaacttgagaaaacaactagttacgaataccaaaatgtgcattatttttttaatatttagagaaaagggaaaaagaggaaatcaagtagagagaggaaatatcaagaaaccaaatcacagagtccaattattggctctggccattgaatgggtcattattccatgccttgtccacctgacttataaatgcaagcaaatatttattatttgatgtaggaatacactggcttcttataaaaaaaagtatttgagactgggcacagtggctcatgtctgcagttccagcactttgggaggccgaggcagaggacggcttgaggctaggagttctagaccaggcctgggtaacataggaagatcctgtctctacaaaaaagtttaaaattagttgggcatggtagtatgtgcctgtagtcctagctacttgggaggctgaaacccaggtgtttaaggttacagtgagttatgatcacaccactacactccagcctgggtgacacttgctctgggtgacagagcaagaccctatctctggagggaaaaacattatttgacgaaatttcaatttaaaagtaattccagacaaataataaaatcaaaacacaattctaacatgataaaatgtgttcattttatattttaacaaatggagaaagtacagacaacattcttaaattattctgtcttataatctcccttatataagataattatattttacaatccatccattaatcagtatctgtacattttcttcctacagggatatttcctttaaactttaagtatctgcatacttgaggggaaaaaatcagttttcaataagctgctgtttattgatttttatttatttatttattttgagatggagtctcactctgtgacccaggctggaatgcagtggcacaatcttggctcactgcaacctctgcctcctgggttcaagtgatcctcctgcttcaacctcccaagtagctgggattacaggcatgtgccaccacacccagataatttttttgtatttttaggagagacggggtttcaccatgttggccaggctggtcttgaactcctgacctcagaagctgctctttattttgattgtacatagtttgactattttgagtgacttaactggttactaactggttatcccagctagaattgtttacaaggctaaatgtgatactaacttaatgtgagtaaagcagtgcctggcacatatgcacccaataaatgttagctgccatcatcatcatcatcaaagtgacaagtaactgattaaaaagtcagactttcatttatagaaaaaggcatacttctttgggtatatacccagtaatggtattgctgggtcaaatggtatttctggttctagatctttgaggaatcgccacactgccttccacaatggttgaactaatttacattcccaccaatggtgtaaacgtgttcctatttctccacagcctcaccagcatctgttgtttcttgactttttaataaattgccattctacacatgaacacacatgtttattgcagcactatttacaatagcaaagacgtggaaccaacccaaattcccatcaatgacagactggataaagaaaaggtggtgcatatacaccatggaatactatgcaaccgtaaaaaagaacgagatcatgtcctttgcaggcacatggatgaaactggaagctatcatcttcagcaaactaacacaggaacagaaaaccaaacaccacatgttctcactcataagtgggagttgaacaatgagaacacatggacacagggaggggaacaaaacacaccagggcctgtcagcaggtggtgggcaaggggaggaagagcattaggacaaatccctaatgcatgcagggcttaaaacctagatgacaggttgataggtgcagcaaaccaccatggcacatgtatacctatgtaacaaacctgcacgttctgcacatgtatcctggaacttaaagtaaaatttaaaaaaaatttttttaattaaaaaaaagaaaatggtatacgtgttcccaggttaaggtaagatgtaacacagcattgtacatggaagaaggtattatttgtatcagctgctaaatgtttttgttgtttgggcattggtttttgttttctgttttgtttgttttgttttttcggtaccccatgaccagtcaatagtttgttgaacatctattacataataggcactctgctacatggcttagattagggctctgtctacatacacaaactgagctgaagtttaaaaacctaacagaaactgtagtagtctctcctcaatttaaacaccccaggggtataatccttagctcctaaagggagaataaggttggaatgaacaaaggtaagagggaaatcttggaaaggatatatgcaagcccttataaaggactgagcaataaaaaataaagacagtacacaaaaccaagataacaacatcagtgaactctttctaccctaagtttgtaataattaaatgaataataacttttttctctcttgttagaacctccttaggctctttcttctctacagtttcaaccggatatttcaaattcacttagctttctttcaaagatcacaataagaagacatctctgtcctggtccagtcctgcatctgacatgagtgccactctgcctgagagtcaatactgattcccaagtctgtgccagagacacagcctgaggcacatcccttcctcttccctgacatgaatctctgctgccacttgctctgaccatcccttttggtttcctgccaaacctcctcccctgctctacaaagcatgtgacttctcgcttctcttcccaatctctttttttttctttttctaatggccctcaacaggaatgatttgagatttatatatgaaaaccaaaattcttcccatagtgaaagttatattcaaaagtaaagcttcatgtaaaggaagcgctaggttgaagagagattactgtaagggaactaaatgaagctattattctttaatgtattattgaactgagccaataattggctttttagtttaattcaacttgttttcctaccaaaatatagattctatgatcctttatttctaattcttttaaaattgtatatataagagcctaactgtatcttactctatatatgctcttctgcagtcgtggcaattcctgtctatctcttaatttaccttaagtaagaataacacaggaataaaatccctgtatatgttaacatattttctaaaaatatattaatggctttctttacaacatgactgtaaaatatacaattttctataaatattcaagtatgtgttgggatggaaggggcttttaaaagcacatattattggtagaaaaagagaaaagttaaaactcacctaaatcaactcccctcacctaacatatgaagaaagtaatatttaaagtggtgaagtgactggtccaatgtacacatctgaccttggcaggcccacagagtttgcacatgccctgcctcctacggaaagaataatggcatgtggcactggccacttcaagatgcagctctcctggtagtgtgttggactgtatccaaacaacccaaaacatgagacaagttagtacaaactggctattaggtgttctacttccccatctctaaagaaagaaagaaagaaagagaaaggaaggaaaaaaaatacaatacaatctaggtttgttataaaagtgtttgtttttaactctacttttgaactttttgaacttttcaaattggtttctggtatgtactatctccaaatccaaagggggttcctagagctatccaatatgtgatggagctgttgaaagaacatgaattcaactatattaattatgacatatagtcacagttcaattacttccaacacagtataaattttttataaaggcagaaaaataaaaatggtcaacatcctattaaagactctgtattctcaaagatggtcatgctacctgatatagtttgactctgtgtccccacccaaatctcatgttgaattgtaatccccagtgttgagggaggaacttgttgggaggtgattggatcatggggtagatttcccccttgctgttctcataatagtgagttctcatgagatccggttgttggaaagtatgtggcacttccccctttgtgctgtctcgctctctctctcctgctccaccatggtaagatgtgcttgcttcctcttagccttctgccatgatcgtaagtttcctgaggcctcccagcaatgcttcctgtacaacctatggaactgtgagtcaattaaacttctttcctcataaattacccagtctcaggtagttctttatagtagtgtgagaatggtctaatacattacccatacatgccatatgtgtgtataagcagtggtcatgttctcagaagaacaagtatgggctttggaggcaaactaatctgggttcatactccacctctgccactctctgaccttctttgggaagttatttaatagctttgaccctatgttatcattgtaatggattgattggtgtctcccaaaaagatatgttcaagtcctaattcccagtacctgtgaatataccatatttggaaatataatctttgccaatgtaattaatttaaggatctcaagactagatcatcctggatttagggtgggccctaaatccaatgaccagggcccttataagagaaaggggagggcaactggagaccagagatccagagggaaggccatgagaaggcagaggcagagacaggagtcatgcagccacaagccagagaatgccaagggttgccagcagccaccaaaagccattaataggagagaagcacacaatagactcgcctcagagcctccaggagggaacaaactctgcaaacacctagattttggacgtctggcctccagaactttatttactattttctttgatggagacatcagtaccaatgtattaaaggctttccaacccaatttcattatcttttcccctttcagaaaaaataaaatatatcgcttattaaaacataagaaactagaccttactcaagtcttaaattaactactaactaatgatttgtctacatatcaaaggaagtcacacacacacaaaaaaaaagaaagaaaaactttaaaaatactgtgaaattgattttgtggtttaaaaacctaatttgaagtggtttatttttagaatgccacctttttctctatttacttaattcaggaagaacccatgtgcaagtagacacagccagatggtttggcagtggtcttttttcctttcattcccttaatctcccacttgcaaagtaaagaaaagcagcagtcataattggttggccctatatgattcataggtacgcaattaatagctgcagcaaagataaagcattttcagtttcttggaacacaagctctaaaaagtaagagggagctaaaaccttaacactcttttacagaagggaataaacctcctgcaacatcttccttgttttttcctttattcaggccgatagtttgatgacttgagaggcatactacagttcatgaaagggacaatagagaggtctgcatcccctttgaatgcagacgtgtaaatactagaggagataaggtagatgtccctgcttgctggagccctctctccatcattcaggccaaaagaacaggaggagagacaagtgtgattaattaagctctgttttattctgtgctccattttaggttataggtttacatatgttaggcactgggtactctcattaattataataggtacatgtcattttctccttcttacaaatgtggtaactgatacctagagagcttaaataacgtgggtattccataactgggccataaacacgtaaaactgacatttgtctctcttttttttttttttttttttgagacgaagtctcactctgttgcctaagctggagtgcagtggcacgatctcagctcactgcaacctccgcctcccgggttcaagtgattctcctgcctcagcctcccgagtagctgggactacaggcgcatgccaccacacccagctaattattgtatttttagtagacagggttacaccatgttggccaggctggtctcaaactcctgacctcaggtaatccacccaccttggcctcccaaagtgctgggattacaggtgtgagtcaccgtgcccggccgacacttgtctctgtataacttcccactcccacttaaaagaaaggattcaggagtgaccaagaaacttgaacgtggttgttgatgtttatttgaccaaacagcattaaagagagagtttcactgtaagtaaagaaaaaaaaaaaaaagctttctggacttaaatctgattacaacacattttaaatccactgaaacttatcctgataccaaaagacaagctttgcctatgccagttctcaaagctttgaaaccctagtcatgaagcagcaggtgtggactgccttagattgttctgggggataaaccacactcccccagtgccacagcttgcccaggattttccctgtgtcctcgattcttcatctgcctgaggcccaccttcttggagaagggacagcacagaaaagattacatgtcattttttaaggccaagtaaggcctagtagttcaaattaaaacccagattttcagcatagcttttctgaaataagtgttcctgtgagaatcactagctcctacattgttgccttgaccctcataggcttatgagtgaggaagtcctctgggatgtggcgctgtccagaagcggattcaaaactaatgtaagaaatagctttgacctttagagagcttgaaatctagtgggcagacacagcagtctattagaaagcaattacaatttaatcctcaccattctggcgcaacctctatcaggaaaggtgagaaatctccatacggattggaaagataaggggaaaataaggaggaaaggctagcttgagttagactttgaatgatgaggaaggggatttgaaggatgaggagggaaggaattagggtaaaggaagataactgtcattgaagagaaagtcataaaaattattacagttattacagtttctttggcaggcagagaaggaaggaaaagttgaacaaaacgagcaaatgcaaagttatgtctactgggtctttttccaggccaagataccccattcacatcctgtacttaactcacttccacctggacaggctcctgaaaggttaaaggctcattttactctccacaaatacatttgcctaatttttacagccatttacacagcaggtaaacaaacttcttgatccaagatgaaaacgtaattgtcacccatttcagtgaagaagtgaaaacagtggttgaaagttaccagcagagcatgaatatgagagcttctagtgaagtaacagaaccaggctacgccacaaggaactcaagaggtgtgctggtaaatttcagtgttctacataagaaagcattacctgcttgtgcttaagaaatatgcatttcagtgggcagcaacagaacaaaatccttcaaagtttgtttcttcaactagacatctgtggatacaattatatatacgatttgccacagctcacaaaattttatgattacctagaccccaaaccaaagcaaggtggtaattctgtgaaaatgaaagtttccatcagatttctgtcatggaaaacaaatgtggtctttataaatgagagacaggttccctttcctttttttttttttttttttttgagacggagtctcgctctgtcgcccaggctggagtgcagtggcgggatctcggctcactgcaagctccgcctcccgggttcacgccattctcctgcctcagcctcccaagtagctgggactacaggcgcccgccactacgcccggctaattttttgtatttttagtagagacggggtttcaccgttttagccgggatggtctcgatctcctgacctcgtgatccgcccgcctcggcctcccaaagtgctgccctttcctttttaagtgatgtctgtggtggagaggaaagccactgtcagtcatgaaacgagttgacaattgattacacctaaataatccactgacttgagagtctcttgatcctgtatatcctggcttcctatctgctgtctacttctatgtgcaccatccatccagccctccaggtcttaacacatctagtaccccattaagagtctttcctaaatgtccagtggtgatatccaaaagagaagacaagtaataaaagaagaaaacaaatatctacactttaaaaaaaaaaaaagtcaacttgaaatgccaaaaattctcatccactcctcagaatcagaaactatgtttcatttgtcttggtttacgcagtgcccatcacaggggctgagacaaatactctgaagtgtttgtgaacaactgagagtcttttctaggaatattggaatcaaatgacttctctttcatttccaatcaagcaaggtcaaattaatattcaaatattgtaccttaaatatttgggaatgatgcagctcacttttcaagacactttggcactttttcaaaaagttaaatatagagttactatgttacccaacaatttcacagctaggtccacagctagcagaactgaaaacatatgcccacataaaacttgttcacaaatattcacagcactattatttataatagctagaaaatggaaacaatacaaatgtcactcaatgaataatgaataaacaaaatgtggtatatccatgcaatggaaaattattcagccataaaaaggaatagagttctgacacatgctgcaatatggatgaatcttgaaagcattaggctttcaagtaaaagagacccaaaatgctacatactgtgtgattgcatttatctgaaatgtccagaataggcaaatccactgggacagaaagtagattagggagggataatgagaagtaactgctaacaggtaaaggcttctttttaggagatgaaaatgttctggaatcagacagtggtaatgcttatacaactttgtgaatatactaaaaaccatgaaattgtatactttaaaaaggtattttatggtatgtcaattatatcacaataaaaagaaatttgagaaacctcttggtgaagaaatcgtagtcaggatttatgtttagttcttcaggtgtgatgaaaactattaatagtctatgcattctttttttctttgtcaatagatattttgataacatcatcaaaattcttatacctacaaaagccctttggccatttattatataattaatcactttaaaatagcaagagtaataataataatagcaactaacatttattgaatacttactatacattggtcactgttctaaattctttgcatgtattaactcctaaaagagttaaaagaacaactctataaggtgagtactattcttctctctatttaatataggaggaaactgaggcacagagagcttaccacagtcacacagctagttagtggtggagccaggatccaagccgacacagcctggtccaaagctgacactcttaaccaccattcaatccacctttaatgcaaataggaaaagggttagtgttgtagaaagagtgctgggtgagtcactgcaggcccaaatccagagactggtctatgttttgccacttgcaagctctgtaagaccagtatttccttctagcctgctcctcctgatttttaaagtgaggaagtggggcggtgccatccctaagtccccagtcactttgaatctccatgattctgtaactaaatcatgatacagcaagcaaaccaaaaaaatgccaaggtaaatatcctatcattagtgtgttgtgcacatcagaaaccttaaacttataatattttatagacaacaagtaggaattttaggattaaataactgaaatgacctcagaggttaaaggacaaggtcagctaccaggtacttttttcaaagacaaaaaaaaaaagaaaattctgttcattctaccttagactcaagaaatcattccttacatgatttttttcctgaaatgcaatttcatgatatctcattcaatcctcaacaaataaatatcaaaatcctcctatgtgccaggcatttttgaggcattaagaatagaatttttaaaaaataaagcataaaaaaggggggttctgttcattttagaaggggataataagcaaatcaataaacatgataatttcagatagtgataagtgctaaaaaaagaaaataaagcaggatggtatgatagtaattggttgctttagtatctgctaaaactgaagctactgtacagcagaaatttttgtctattttgctcattatgtcccaagtacctataagagcatttgaatgaattagcaagagataagtaaatggcactctttacattgtggcagggactgctagctaatcactaagtcagtttctaccttttcctgggctcataggtagattatatgtattagcttgccacaatttccattacaaaatacttcacatggggtggcttaaacaacagaaatttattttctcacagttccagatgctagaagtccaggatgaaggtgttcgcaggtttggtgtctcctgcggcctctcttattggcttgcagatgatcactttctctctgtgtcctcatgtggtctattctctgtgtgtacacacatctctggtgtctctctctatgtgtcctaattgtcttttcttataaggacatcagtcagatcggattaaggtccaccctaatggcctctttttagcttaattccctctttaaaggcctatctccaaatacagtcatattctgagagtactggaggttacggcttcaatatatgaatttggccagggttgctggggagggcggggagggtcacaattcagtcctaacactacatttcccagcctcccttgcatttaggtggaaagcagtcataaggctacagccagtggcatctgaatagaagaaatgtgtgccacttcctggccagctccatagaaacctcatggccttccatgctgtttccccatctgctggcaggatattgacccccgtgatgatgttagaagcctcatggtaaaagtgacaaagcctgggtccctgaaaatagtggggcagaacttacaactgtaccattgacagaggcctacatcagaccactatatgagggaaaaaatgaacacgtgctgagatttgcttattacagcagttcgcctacattaaacaacatcacttcaattatgccttcagagctcctagtcttccccaaaagctttctgttattcaagttaaagagttttcaatttttaaaaaagatttcctcacaggactatgatttcattttttaaagtcctctcttcctattctctttactttcagcgtaaaatacaggcaaagttatccaaaaccaggcagaggtcttttagtgtaagttttcactgttaaagattggcacatcacagatgaaagttaaaaataatatattacttatcatgagataatgcaaggacataaaaaccagagattcccaatattcttaaacccatagtttcaacctcacaaaaactaagcctgtatgggccaactcagggttgccagctgctgctgtggttcatatactaaaaataacagggcaccaaggagcagctagtcaggctgaatctgggctgcagtcctccctggaccaggaacaacaaacaaggtgaaggaggtaatagggggttgggggcaccagtcttcgctgcagtgatcccgagagcaatggggaatccaaaaataaacattggttgactccagtgcccttgaacaagtatgcaagtcactgaataacagagccagctaatctaaatgccaatctaaacttctcctgagctgctaatgcaggtggccagatctttaacttctaaataagtttaccagaagaggtatgatgattttatgtcatttatatttctaacagatgcatctgacccattccaaaatatctaaaattttcttttaggggcccagaaatataattcacagcttgagtgatgaaatacaagcagcagcctgcctatttgttccttccttccttcatgtcttcattcattcattcattcaacattattatttatacctaatatgggccaggcactctgctaaggactagggatacatggctagtagaatctagtcttttccctcggggatttcacagtctgagaaggaaagcacatagaaaaatgtgataattgttatataggcattttggcaaggaaggcagagaaggaaatggccagccccccgccaatggagaataaagatgaaaacagaaatactcccaagacccccaaataagtatctattacagagacttcctctacacttggttacaaaagaaagaagctttaatccaaacaggggtctaacaatgtaaaataattgcactgtaggcctaaaaccatgaaggaaaaaatcaagtctcaaaggagaaaggcctgaacatcttgaatgcccagcctgaccttgtctgtgtcctgttctcagaaggtgtctcccaagttttcgaggtaccatttttctctggttacctccagctcccaagagtctcactaaaatacaaaacacatcctttaatatggccctacttcctgggctccttaaacatactttaatacctgttggaacatatcgtataaaagcaattcatcacttatcttctcccaacacgcagcctgtgtcttcaccctggcggactggcattttaaagtcagtggcatctaaacgatctctgaaaactgagctttttaaaacaaaataaaatgggggactaagtcatgaacatcagtggtctaaaccttatgtactttttgttttatttcatattttaactagatttacttacagcaagcatcttttgtagttgagaaaatgtggattgtaagtggagttctttttggttagtgaaatgacaagttctttaaactcctttcaaaagagagaccaggtctcagattgaggatgtcatgtacaatagtcttttccccttgtaactttcctttgatggccaattaaagctacttattcctacaacaaggacatgtattttgtgggaacagaactgaagccagcaccttaatctcatgtaattccactgaatgactttatttcctccccaggctgactcggggctcccaccagtggatggtggtggtggtagtgatgttttgaatacgaccctctgatctactggatttgggctgagaaagatacttgaatgactttgttgaaggtgaagtaaaggggaaccaaatttctgtaatgaaatatttcaagcagatcttcataatatcttgagtcattgggtaactgaacaaaatttactgaaaggggttgtggtagccagactcttaagatagcaccagtgatccccacctcctggttgtcccacccctgcgtcatcccctcctactgagtgtgagctggattcagtgactcaattctaacaaggaaaataaagagaagtgtcagtgtgtgacccagagacaaggtcataaaaagcagcatgtgtccacacacatcactcccttgaggggaggccagctgccatgtcatgacagccctatagagacacccaagtggcaaggaactgagggcttctgtgaatgagcttggaagcatatgttccccagccttcacatgacggtagtccccagcaatatctggattgcaaccctggaagaaaccctacgctacaaccacactgttatgccagctcccagattcctgacccgtagaatctaaaaaataaaaaataaaaaattttattgtttaaagctgtaaatttagggaaaatttgtcacacagcaataattagtacaggggctaaaagtatccactcccaggacatggtgtaaggagtgccaagaatgtgcccagatctacacaattacaaccccacctcattgctctcaggccggaaatgctgcaagtcctgtcttaaatatgtattcaatcactcatagagtatacattgggtgccctctgtgtacagtcagggtacctaatgttacagatagcaagggaatgtgccccttctgaaatcctatgttccctcccctgaagaatcaaccagctttcctgtcaaaagcagtttttaaggccactaaaaactgaagctaaccattgagctgagtccagggcctcctattaaaaggaaaaaaaagggaacttcatggaatgtagtcaccaccccaccctcatagttccccctaaatttaaatagaaacacttcactctaccctcttaaaattaagtattcacacaaagcagacactggagcataaaatatctttttacttcaccaatttgaacaccagagatttgccttaaagggccaggcaacctgaagcttttcaacaaaaacaactcgtggaatactggaggcagatgatatttcatcttaagcatcaggtatattgtctacaccatcagagattctcaaaggattagtactaaatagtgcctattattatattaatgataaaccatttgcatatcactaacaagtttcacccaggtagggctaatccctcagtttattttgtttgtagatcagccaacaggttccttattcactgtaggcaaggcaagaaacacactttttcttcaacctagttggttggaccaaatgtttacatatacacatttatccccaccattataaccatcatgcagcttctaggacaataatactatttcttacataaaaatattaactagaaaggctttcaattagccaaatgtaataacaaacagatatgtacttaaggcttggctactgtgaaatgaagttataagctagtgaaatgaagtcataagctggtcatacaaatacatatttttcaataacaggattttttaaaagattttttaaaataattcatacctttgttgattccacttgtgccatttgcaatttaacatcagaaaataatcattccaaatggttctccctgctatgattcaccacggtgaatgattctgccactcacagcaaatcagagaatggtttggaatggcttattttcctgctccaataaactatgactaggcattcagcagatttttcttttgtttcttattattttgcagagtcgagaaaaatatgaaaaataaaagaaataactgaatggcccactgctttcaaaacgtatttagtcttgctcacttatgtcaaatctattataattcacctccatcctgctgtttttctagtgttttccatatcatggaaccctcaccagtagacgcccattctctttcggaccccaaggcatggcttaccttttcctataaaactctaagtgctcactgccaaaatagatgtgtgtgataaaattaaagtatttcactggcctttggttctggaaataattggcacaaatctcctttgttgcattaattgtatatcattgtttatccagcgagtatctcagcacccacttagccatctgggcctcagcccagaaaactgacttacatgaaataacaatgaggccttttgacagttttcaatacactgctttaataattttttcaattgtatacttttcctgattcaggagtctaaaatcagtaactacaaagaaacagctgctacaattctctttatcctcctactctcatccttaagattccaggaatcatcggtcagaagtattcaacttaccaatgcttaaacctttgggaaaaaagcatctagattccctctcaaccccagacatctagaaaaaaacaataatgaatgatgatagacccagtcagagagaactatcttctcatcatttttcatgctaatgtataaagttactgatattctacaatcctctgtcttctcaaagcatctacacacacacacactatacacacacacgcgcacacacacacacacacacacaagtatgcatacccagaatctcctaagctaggactgccaacaacccactagcaggggcgaagtttggatgccaaaagacattgtattgtcaaagctagagttacatgaggtacactttgcatagaaataatgttataaatgaagatcatataaacttggtttatctatttaatttatatcacttttcatagccgggctctatattcttgactgggtgaagatataaatgaactagtgggctccaaactgtcttggtcaaacaatacattaaaaattatcatgagcatattcatcatgtatgtgtgtgtgtatgtatttacaaattatataggtattctgctgtgatgcaaactcacaaaaaataatactaggataagaaagaaataatatacataggcattctactatacgtctgtaaactccacacctgcacacctcctggggtgtacactttccattttgaagctccagtgatataccatgttctgccctttaacagttatttgtttggtgggtgaaaacaatatatctgccacttttatgcagcattttatacttcataaagcatttcatacacattatctaaaatagtcctcacaaacaccttctcctcattttatagactaggaatttaagtaacgtaagtgcctaagatcacccaaatggactgtggctaaactagatttgaaaccagggcgatactacagatatacgacagattaaatgggtttttatgtgccagtctggaaaccacaccaccacttacaatattacttccaagggaaaatgctttctgagttctaattaactgacttgtaaaggaacttttcgaatataggtcatacattcaggactagatgtattacatattttcaaataaatgtttttttcatacaggataatctgaaacttttattataccactaatgccaaaaagtaaatcatataaacataaaagccctaccaagcagtgctgagatgcccatgttctataagacagtcacccaatgctcagggcagcatttctacctttacttgtataaccaatttcatgtcccgaaattaatgaaccacattcccttataagtgtttaagaatcagtaaaattttatttataattattaagcttgtaagtgttatgctttagctctggaaaattatctttttcttttaaagccaaaaagttgcaaatgcaagaaagaaaatgcctgtaatgaatggtgctttgggtcagaaaggtgactagagaaaccaaagtatttttgttttccctctgccaaaggtgacttagatacttagacttatgctggactcccttgagtcttcttgaaccctgctttcttagattgccagcattgattaagtaatatttttacttttaatatttaacaatgcattttactttataaaaaatttatatcccctttggcccataacctgacttctgtgaacttaatctaagaaaataatataaaattatcaaaacattttagacagaaagtatttcttcataatgttacttacaaattgaaaatttaaaagcaacttgaatgtttaacaataaatgacagaaatactcaatgatatagcatacttctgtttaaaatgatggctacaaaagccatacagaagcatcaaaaaataaatttagatatattaattgataaaagcaggatatagaccatgtgtgcattatacttacaatgacaataatatcataggaaaaaaacagactagcagcaaatgggcctaaatgaatcaatgttttggttaaagatagtagaattttgggtgacttttttttctatattttctaattttctctgaggtgggtatttttataactaaaaagaggtttctacaaacggcatctgatgatttataaggaatttctacaaatcaataagaaaaatataaatatctctaatcaaaactagggaaatatgaacaaacaattcagaaaaggaaatccaaatggtaataaaatgaaaagaggttcaatcttctctagtaatcagaaaaattttaattaaattaaaataataaaatataattccatgtcataatattaacaaaaatttaaaagttttataattttcgatgtaagggtatatgaatattggagctttcatacacagtaagtaagagtaaaaatttgtacaatcactttggagactaacctggtaacatctaataaagcacataagagtcacaacaatgttcattgtgacattattgataatagtaaaaagtttaaaatgacatgcatttctagcaatagggaaatagataaataaatcatgatattttcatatgatgaaatattataaagcaataaaaatgaaagaatttgacctatatggaacatcacagataaatcacaaaagcatactgttgataagggaaagaagatcaggataatataaacagttggtcccatttaaataaagttttaaagcatacaaaacaatgctattttataactacatatgttatagcagtagtgtaaaaatatgcatgggatagctaaacaccaaattcacgataatgacaactttggaaaggaagaaaaacaaatgggattcggggttgtgaatccagaggacctaagttctaatctgtaatgtaaaacacacaccacacacaggcacgcacacttaatccatctgaagcaagattagcaaaggattattaaagacaactgaatgcgtatttgcagatacataggtgtccattatttagtctttttttcttaatatttaacataaaacattgtaaagaaacaatgagcacctaggctgggcatgtgtgctcacacctgtaatcctagcactttgggaggcctaagagggcagatcacttgagaccaggagttcaagaccagtctggccaacatggtgaaatcccatctctactaaaaatacaaaaattagcccggcatggtggtgtgtgcctatagtcccagctacttgggaggctgaggcaggagaatcgcttgaacctgggaggtggaggttgcagtgagccgagattgctccactgcactccagcctgggtgacagagcaatactcaaaaaaaaaaaaaaaaaaaaaaaggaaagaaagaaagaaaaaaaaaagatagaaaaagaaacaatgagcacctaaaacattctttattggaaacaataaaattctcttgcaagggtccagaatcttatctctaaacaaaataaacagagtgctctcaatgaaataaacagtggttagaactgagatagattcatagaggatgatctaggtaagtaaagtcgtttgcagtctctccggtcctgcttctacttgctgtgaggtgtggcatgttagaaatgttgtttctgccttcatatttggctggggaagtggggcagggagacaacccaaaaaagattgcagcgtattatggtggaggggctcaccctcaaaaaactccgacgccgcagtttaaagtgcttcagctacgtgtattgatgtttaattgtgtagcaacatgaatttggtgtcttaacctttccgcctcctggaagatattgagttatccaacccacaaaaccctggagactctcaaggcttcccaaaaccccaaactctccagaaaggagccatgcttggaaggactagtgaatttcatgtctgtgaaaagccatcttcaacagtctggggggctgcttatcacatagaaatgctggtagggggctgggtgcagtggctcatgcctgtaatcccagcactttgggaggccaaggcgggtagatcacctgaggtcaagagttcaagaccagcctggccaacatagtgaaaccccatctctactaaaaatacaaaaaaattagccaggcgtggtggcaggcacctataatcccagctacttgggaggctgaggcaggagaattgcttgaacccaggaggtggaggttgcactgagccaagaccatgccattgcactccagcctgggtgacaagaaaaaagctccatctcaaaaaaaaaaaaaaaaaaaatgctgataaggaagaagagatgattgctttgaaaggggtcacattctaagtctgttcttggaggcaatgattattcttttgttccagcagagggtgcaccctggcagacaagtcagaatcctatggtaattggcatgcaaagagacatcaccagcagactgctctgccctggagaacaggcatgggggtgagcaggttcataaaaccaactccaccttctcaggccaacactaccaccatgtacaactgtaactggcctgcgccatctccaaaaactaaagcagcaggtttattcattgaaacttaaatccacataatagaaaactttgatattgacatatcccatgttttgatctactattcccttgaaaacatcttttgtgaacaaatatcccaaaacagtcaagcccaaccagcctgaaatgtgtgttgtttgaccttttggccatctagtctgcatctggaggtaaatttggaaagtggagcaaatctactgaaagattgaccctcctccttcctgaatatcccggaagctttttggaattcaacttgcaagtcatgcttcattcgaggaacttgattataatagttccggtgtgaagggtgctggacaggacactacgcggacatcaggcatagcgattcacacattcctctacaaagagcttcaggtgtttttagaacaaaatgaaagaaaatgaagctgagtcagttctcaaaactgtcctcctgtcataagattcaccagaattactcacagttatcacagtcattctcagaaatgtcaagtgtaggtgctcttccgggccttcagaatggttcttcctctctcagtctcctccctctatttggaatggcccagaaaaacagtacactgaccaagagccccatctaaaatcaattgtttgcttaaaaatggctaccataatatatagtggttaccaaagtgtgtcttatcaaagatgattattttataagaaagacagatcttttcaataaagggaataactaacagcattagaaaaaaattgaagaaaaggtgtagagtaaattgcaataatcttgaccatggggtaattaatatttttttaaaaagaaaaaacttatttcaatcactaagacgactcaaacatacaagacatctacttgtattcaaaagactaaatgtcacatatatgaaccagccaagactcaccatctgagagttaaacattataaaaagaaaagtcttaagcttaattctcctagtctatgcctgcttcaaattaacataataaagaatcagaatataggaaaaaagtagtaaaagccctgttaaagaaaaacaatgcacatatgcttattgggatgtaaaatacaaataatctatatatgaaataaatatatttccaaatcaaataagctatagatgtgataaaatatttccaaattttatcatatatttaaatccaggtttccacagcaggtcttaggttagtcaaatagagtttactataattcaagtgcccccccaaaaaatactttagcaagagctacttatataaaaaatggtattgcccatgcaagtccaatgaaacaagtttcctgtttgaaatatcaaatttaattaccaaaatctccatttttttcctctgaacactaaaaggtttcatgtaatgaggttcaatttaaagaactctcttcactacatgatttcatctcacttaaaaaccatagcgcttcaggtgtccaaacaaatgctgcaaactaaacctggacacacatactcacagagccttccccaatcccaggagaaatttatacatgaagatccttctgtttagccaggtgaactctgctagaaattcatattaaagagaactttgaagaaggatggtacaggagaacaggtgcagcaaaggcaccatgtattgagcatcttttatgcgcctctcattttaagtgtttcatctcatacaatccttacagccacccctgaggtacacacaattgcccccagtggacaaaagaagaaaggaaagctcagtgtggctgagtgtgctgcccaaggttacacagtggggaggggtgtccagggtctgaactccacgaggggagaactaccttccaattccgaaccctgtgcctagcaagcaccaggggcaggggaggcatttgataaatgtttgttgaattgaatatgactgtaaggcctatctactttggagcatcctggagaatggtgtcagaaagcccaaatgcaatgtgagggataacaaggaggggtagtccacgcagtctagggtgaaccaagtaacttcacccgggctttcctcggatccactgccccctcctcactcactgtcttctcaccattatctctgtccagctctggacatctgtctgggtttgctctctcaaggttgctgccagccttggctggacctaaggctgcttatccttcacctcacttttcaagggagctggtaaccataaaaatactgcccagccatggcttccatcctttagctatttgggattacccaggccctgagacttcccagcttcccactgacaatgttgtttcaaagtcccaggactttgcaggaaatctctgggaatggagctccagaaaaatctgggtggtcaggcttgtgttgctttcatagatgggttttagtgagagagtttgaatctgcctagagtgtacacctcaagtagttattagaaatatctgttagtagtttgtgttctccaacaggggcatatgagggagtcagggaggtttggcagcccctagcatgcacaccactggtaacctggtggatcagttagttttcacactcctttaaagaactatgtgagactgggtaatttataaagaaaaaaggtttaatcaactcacagttctgtgtggctggggaggcctcaggaaacttacaattgtggtggaaggcgaaggggaaacaaggaccttcttcacatggaggcaggagagagaaagagcaatgagaggaactgccaaatacttgtaaaccatcagatcttgtgagaactcactcactatcacaagaacagcatggaggaaaccacccccatgagccaaccacctcccaccaggctcctccctcgacaagtagggattacaatttgagttgagatttaagtggggacacagagccaaaccatatcacctggggaagagttttaagagactaatacatgaagactgtggaaagaggtacctgggcatgcaccttgtggcagagcctgagcaccaaacagcctcaaccacagggtcttgaaaatgacaccccactcctgctgagagcttaaggaagcactctttcaagtgccctctctgctctgcagatcaggctggttttaaaattacaataatcggtaataatatcaaaagctacaaccacaatttgctgattgccaggtaccatgcaatggggctttacctattctaagccccattgatgggggttattatttccccaactttgcagatgagaatatggaatgggaacttaataacctgtccaagcctcagccagtgaaagagccagctgctaacctggatcccatgctccctgcagccagcccacagatcaccctggcaacccagcagatgagcccaagccacacaatagtgcaacttcttcccagatcccaatagaaagttacttgaacttctacttcccctcctgctttccctcgtctgcccacctatgcaggaatgaattcgtgaaaacctggccaggcattccaccttgggaacaacttctatatcccaactttcttaaaatgtcatccaacatggtgaggaaaatgaacttaaattctgaattacattacaaactgactttccttctcattgtggcctggaccagaatcagccaaacttctctgggctcaacttcctcatactcaacacaggtcagatgggcttctcatcttctagtgtgttgacgatggtttatgtcgttgcctcaattttcaggtccctttggccattgggatgaattacacaatgtgaatcagaagtggacaatcaggagaggagaaatccagccatgtctgggcctaggccactcttcagagatgtggcccacaaacactaacaaaaagtggcatcaaagctctgccagtttccaaatacttttaaaatcctagaaacataccttaggataagaaccttagaataacttctagtccaaacccttgtttgacagtaagtaaaccaaaatttagagaactatctgttcatttcccatcacccccactctcgtagctagcatgtggcaggacttggattccgactgaagactcttttaattcaaaggtcatgcatgaggtaccacaaatgcaacctcctctgattttattactttagccactaatatatttatatttggtaatattgccctgaataggagaaaacagggagtaaagcaacccaatccttatagaatgtcagatacagtaaggctcctgaaagtcattattaataaagaaattgaggcacagaagtatgaaaatgctttgccagtaaaatcaagccagatgatgatgacgcagtggctcaaactccagtctgtagacttccagcccagggctctttcctgacaccctgaggaaacattgcagagatgtcaccagttggtcttgttttctaaagttgttaatttccataacacttcttatttcttagacagttaaactatgtacaactatgaaaatatctgtactcagaggtggtataattacatggaaaaaaatataaggaccactgggacaaaatcaaaagagacaattagaacctgagttaaattcaaaaaacaaaaaaggagaggggcaaaatggctgaataggaacaactccagtctgcagctcccagcgagatcaatgcagaaggcaggtgatttctacatttccaactgtggtacccagctcatctcattgggactcgttggacagtgggtgcagcccacggagggtgagcagaagcaggatggggcgtcacctcacccaggaaatgcaaggggtcggggaactcccttctctagccgacagaagccatgagggaccctgccatgagggacagtgtactctggcccagatactatgcttttccaactgtcttcacaacccgcagaccaggagattccctcaggtgcctaggccaccagggctctgagtttcaagcacaaaactgggcagccatttgggcagacactgagctagctgcaggagttttttttcataccccagtggcacctggaacctccgagacagaactgttcactcccctggaaaaggggctgaagccagggagccaagtggtctggctcagcagatcccacccccagaaagcccagcaaactaagatccactggcttgaaattctcactgccagcacagcagtctgaagtccacctgggacatttgagcttggtggggggaggggcatccaccattactgaggctggagtaggaagtattcccctcacagtgtaaacaaagccaccaggaacttccaactaggcactgcccaccgcagctcagcaaagccactgtagccagactgcctctctagattcctcatctctgggcagaacatctctgaaataaaagcagcagccccagtcaggggtttatagttcaactaagcttcataagcaaaggagaaataaaatcctttacagacaagcaaatgctgacagattttgtcaccaccgggttcttgccttacaagagcgcctgaagaaagcactaaacatggaaaggtaaaactggtaccagccactgaaaaacataccaaattgtaaagaccattgacactatgaagaaactgcatcaactaacgggcaaaataaccagctagcatcataatgacaggatcaaattcacacatataaatattaaccttaaatataaacaggctaaatgccccaattaaaagacacagactggcaaattgggtaaagagtcaagacccatcggtgtgctgtgttcaggagacccatctcatgttcaaagatacacataggctcaaaataaagggatggaggaatatttaccaagcaaatggaaagaaaaaaaaaaagcaagggtggcaatccttgtctctgatgaaacagactttaaaccaacaaagatcaaagaagacaaagaagggcattacataatggtaaagagatcaatgcaacaagaagagctaatatatgcacccaatacaagagcacccagattcataaaccaagctcttagagacctacaaagagacttagactcccagataataatagtgggagactttaacaccccactgtcaatattagacagatctacaagacagaaaattaacaaggatattcaggacttgaaatcagctctggaccaagcagacctaatagacatctacagaactctctacaccaaatcaacggaatgtacattcttctcagcaccatatcacacttattctaaaattgaccatgtaattggaagtgaaacactcatcagcaaatgcaaaagaatggaaatcataacaaacagtctctcagaccacagtgcaatcaaattagaactcaggattaagaaactcgctcaaacctgacaatgcatagaaactgaacaacctgctcctgaaggacaactgggtaaataacacaattaaggcagaaataaataagttctttgaaacttatttcaaagaactttgagaacaaagacacaacataccagaatctctgggacacagctaaagcagtgtttagagagaaatttatagcgctaaatgcccacaggagaaagcaggaaagatctaaaatcaaaaacctaaatcacaattaaaagaactagagaagcaagagcaaacaaattcaaaaactaacagaagaaataactaagatcagaatagaattgaaggatagagacttgaagaacccttcaaaaaatcaatgaatccaggagttggttttttgaaaagattaacaaaatagatagatcgctagccagactaataaagcagaaaagagagaagaatcaaatagacacaataaaaaattataaaggggatattatcatcactgatcccacagaaatacaaactcccatcagagaataatataaacacctctatgcaaataaattagaaaatctagaagaaatggatgaattcctggacacgtacaccctccaaagactaaaccagggagaagtcaaatccctgaataggccaataacaagttctgaaattgaggcagtaattaatagcctaccaatcaaaaaaagcccaggaccagacggattcacagctgaattctaccagaggtacaaagaggagctcataccattccttctgaaactattccaaacaatggaaaaagagggactcctccctaactcattttacgaggccagcatcatcctaataccaaaacctgaaaaagacacattaaaaaaagaaaatttcaggccaatatccctgatgaacatcaatgtgaaaatcctcagtaaaatactggcaaactgaatccagcagtacattaaaaagcttatccaccacgatcaagtcggcttcttccctgggatgcaagtctgattcaacatatgcaaatctataaacataatccatcacataaacataaccaatgacaaaaaccacatgattatctcaacagatgcataaaaggcctttgataaaattcaacacccctcatgataaaaactctcaataaactaggtattgatggaacgtatctaaaaataataagagctacttatgacaaacccacagtctacatcatactgagtgggcaaaagctggaaacattccctttgaaaaccagcacaagacaaggatgccctctctcaccactcctattcaacatagtattggaagttctggccagggcaatcaggcaagagaaagaaatcaagggtattcaaataggaaaaaaaaggaagtcaaatggtctctgtttgcagatgacagaattgtatatttagaaaaccccttcatctcagcccaaaatctccttaagctgataggcaacttcagcaaagtctcaggatacaaaatcaatgtgcaaaaatcacaaacattcctatataccaataatagacaaacagaaagctaaatcatgagtgaactcccattcacaactgctacaaagagaataaaatacctaggaatacaatttacaagggatgtgaaggacctcttcaaggagaactaaaaaccattgctcaaggaaataagagatgacacaaacaaatggaaaaacattccatgctcatgaataggaagaattactatcatgaaaatggccatactgcccaaagtaatttatagattcaatgctatccccatcaagctaccattgactttcttcacagaataagaaaaaactactttaaatttcatgtggaacagaaatagagcccgtacagccaagacaatcctaagcaaaaagaacaaagctggaggcatcacgctacctgacttcaaactatactacaaggctacagtaaccaaaacagcatggtactggtaccaaaacagatatatagaccaatggaacagaacagaggcctcagaaataataccacacatctacaaccatctgatctttgacaaacctgataaaaacaagcaataaggaaaggattccctatttaataaatggtgttgggaaaactggctagccgtgcagaaaactgaaactggacccctttcttacaccttatacaaaattaactaaagatggattaaaaacttaaacgtgagacctaaaaccatacaaaactctagaagaaaacctaggcaataccattcaggacataggcatggtcaaagacttcatgactaaaacatcaaaagtaatggcaacaaaagccaaaattgataaataggatctaattaaactaaagagtttctgcacagcaaaagaaactttcatcagagtgaacaggcaacctacagaatgtgagaacatttttgcaatctatccatctgacaaagggctaatatccagaatctataaggaacccaaacaaatttacaagaaactatcaaacaaccccatcaaaaagtggatgaatgatatgaacagacatttctcaaaagaagacatttatgcagccaacaaacatatgaaaaaaagcttatcatcactggtcattagagaaatgcaaaccaaaaccacaatgagataccatctcataccagttagaatggcaatcattaaaaagtcaggaaacaacagatgctggagaggatgtggagaaataggaacacttttacactgttggtgggactgtaaattagttcaaccattgtgaaacacagtgtggcgattcctcaaggatctagaaccagaaataccatttgacccagcaatcccattgctgggtatatacccaaaggattatacattattctgctataaagacacatgcacacatatgtttattgcagcactattcataatagcaaagacttggaaccaacccaaatgcccatcaatgatagactggttaaagaaaatgtggcacatgtacaccagggaatactatgcagccattaaaaaggatgcagggacatggatgaagctggaaatcatcattctcagcaaaataacacaggaacagaaaaccaaatatcgcatatattctcactcataagtgggagttgaacaatgagaacacatggacacagggagggcaacatcacacaccggggcctgttgggggttgggggactaggggagggatagcattgggagaaatacctaatgtagatgacaggttgatgggtgcagcaaaccaccatggcacgtgtatacctttgtaacaaacctgcacgttctgcacatgtatcccagaacttaaagtataagaaaaaaaaaatgctatcacatacacagccattttcagctgggcaatcaaaactgggccatgttgaagctttcaccccacaagctgaaatacagctgaaagatccacgccccaggggcagcctagccaggctggacaccagctcctgctcccaggcttctccccctcaccctctgctttcacagacctcttccacatcagaggctacacaggaggagggagccggttttgttttctgcataataaagatttcaaaaggcgaacgaatgaaacttccatgccttgttcggaagaagttcattttttaatatatttaagaaacatctaagcatacaaacaaaaaattttgtaaatgtacacaaagcccccttgtggaagtatatttaaaaaccattttgagggctggaatcttggaaagggagaaattatggcattcatgatattgtaggctcccgtgggctggtcatcatgtgaggaatagatgcaggtatctgacggcagccgaagcagcataccgtcagccagactgcctgcctcctggactatctttgtataactacagaatccttttttcttttccttgtagccaccaaaaagaagtcccaatatagaccttagcggatttcatcccattttaattctacattgcttttatctatcttttatcagaggaaggaaatcaagcggcataatttggtttaccttttttttaactttcaagaagaaaatatcttcatatctcccaaggcaacagaatcttttgaactaataaaaaccatacaatttcctaggtaccagtttttcctatggaagatttttaaatttccttctaggaaaaataaacaattaaaacacatcctatgaagatatgttaaagaccacgttgagttggaaatgaaataaaatgctgcatgttctgcatttttttaactcaagaaaaacttttttgactttcatgatgtgcatatggccattaatttcaatgtgatattatggtttttggctgaacagacagtatgtatgtatgtatgtaagcaaacaaaacaaatgcattttgtattcaaatttatacaactccatacatttttatgctgtttatttgaaaattaattttggcttaggcctcagagacagcaaatgttgtcaagatttgagggctacctgaaaagccttggggacagcattacccttatgcataagaaacagcaaaataaaataaaaataaatgaatttccaaatacgtcatggctaatcccttgagctgacctacagatgaattatggaggttttgctacaggactgagatctggtgatttcaccgagagatttatcttattttccaacttattttcatatcttatttccttttcttttagaattagactgtaaataaaagagctaagagtgaaggaagctccctttcacagaactcatattggattgataaattaaaatggtgagatgagttttgtatgacccatcctcaaggatttgggaaatttagccgatgcaaaacaaggcattaatttggagaggcctagctacttacaatgcttagtattctgacaatgatgaatggcatcattccaagcaaatggtaatttcactttttgtgacggtactttagagcaaaaccgactttcttcacacaaagaatttgcaatcctattgaacagaggcagtacctgaatatcagaaatccttcattgtttaagtatcatctgatattcttgattggcttcagactgaaggttggagttgaattagggagaacggaggttaagtcctaaccttgaaagacttagcagccattgaaacactgcctttgggcacttattggcctgtatttataaaaaaaaaaaaaacttttcaattcaatgaggggagggagaaaacacaaaacttgtcacattcatcaagtgaagccactggaaagacatctacagaacacccaaaaagcataatctttccgaagcgctgatagaaatggtaattggatgggtcagggaataatacaaccgaagcaggggcaaagcagaatatcgctaaaaaatcaaggtcaaaaagaaaagaacagacccttcttaactagtaaaaaacttacacttggcctttgtactaagggaaaaatatacctgttgctacccgtaatttatgtcctcacaaaaacctctcgaatagaaccttcaaacataaaaagcattaaagaccctcagtttcacagcccataagaaagcttcgccttaaatattggctccatcaaaataagttttctgcatgcagaaaagaaaatgatttttaaaaggagcaactaaaagcagtgactccctttctcaatctaagccatctgtctttccagcaggggaaggtgtgccctgcgggggtagaaatacatttaacaaactctaccctgggggactgaaaaagaccaggcactccgaagactggcagagaatgccagcactgtctccccagagaggaacagacctgatgaatcaccaaatctgggttgctcgttttcctgccttctttgctaatgagctaatcagggctgagccaaatgacacatgtaaacagatgagccgtccggggatgccgccttgtcctgcttttatcttacacaaacacctccacactggacttagaaggcttttggcacaaggcagagaactgatattctgggctgcatccagctgggaaaggaagagaactagtgaagtggtgtgtcgttcaactggtggaactgcacggatgcaggtgtctccttactgacaaagatatcagttaaggggggaaacagtccctgaaaagacagtatctggagcccctcctcttcatccaaggaaataaagcagaacaccctcaaaacctctctggacaggttcccttaagagttaaaaaaaaaacaaaacaaaaaacccaaagctcagcctagcatttccctgtaaaccgtacaaattcactgatacacaagaaagacagcatcatttgttaattcgcaaaattctaaggtgcctgtatacccatttctattaatctaggaattcaactttccacattagatttctacagtgatgcagggtaggagatggagtttatgatttgtgctgacagagccacatcatattttagggagatgacattgctattgatggttccttctaatctattcccagtaacatgctcatctgtatgttttccccaggcaccagaagaacaatctcagatccttaaaacagtatgtcattcctttccacacatctcatatgcacatatattattattatttaacgtttattaagtaccaacagtatgctaggcacaatagacatagggggccataaaaacatatttaacgcatcaaaaaccacaataaaaggatgctgtgtatgtgacagaagacgataaaaatctctgcaattcatagttcaagatgaaatgcaccccaagtcccagagaagccttggaacagtgtggcacatcaaaaaaggtattggaatttttattcagccagcgtaaggaaggttatgcataccttacaattaaacatggccttcctcaaccttcccaacattctgcaacaatgaattctctaatggtaagccactaattacttaatttatctagttaaacttcagcactctacctcattctcaatcataatagcatatactctgtaccaagcactatggtagtcatttaaaatgtatttctctgtatgagagtggggttgaaacttggaaaggttcagtgatgcatccaaggtccatgatcaggatttcattttattgtctgttttccaggatttcacttcctgttttacacacacacacacacacacacacacacacacacacacacacagagagagagagagagagttaagagtgataaatgccattcacaagtttggggatttggagttaatataatatcaaataaccaatttagacattgtgtagacatagcactggccgggccaagatagatatatgctaggggtctcaacttcttcacttgctaacgctactttagacatggtttagtgtagggtaaagagcatggaaccaagttttctgagtctgaatcctggttttgccacttctaagctgagtgactataagcaagtgaattgacatctctgtacctctgtttcctcacatgttaaaaagatatgaggaaaataatagtaacttatttcacagagttattgtgaggatgaaatgagttaacgtataaagaaaacttagtacagtgcccagcacatagtaagtgcttaaaaagctgttatgtcatcagagtcctggcattgagaagcagataatatgttttgagtaaaagacattgttgctgatgcttatcagtaaaccctgtgctgcaagctgctttataattaataaaaatgagtttacactagccatctaactctcttcattccaaactttcatgaacctaagtgaatctacaagacagctggctaaaaccccgaaaagttgcctttttttttttttctccaaaactgctgtaaacactaaaaagttggcttttctatggtcgcctttactgaacaccagatggatggttagaaggtaaagaaaagaccagactcatagtgttaggccccatggaggtgttaaatgaatgaatgaatgaatgatccgacagtgcctagaagctcaaataattcaacaaggcttcaaatttggattcagaatcttctttgaaattgggcaactctcagccacagccagactaatttgcatattttccatgtattttccacttcctccctatttcattgtacatcttctggaaatttctctacttgttatttctacagaggacctggaggagatgggagaggtaaacttcaagtcagttaacggagctcattgttctctaaccaagtgatagccttagttggagaaaaagtcaaagctaatcactaaattcagatttttggattatcagtcaacatgaattgaccatgcattccttagacaaattaggattagtaagcaaagtaggaaaacaatcagagttgatgcttcgtactaagaaaaaaaaaagacgttgttttctaatatggtacttattgtcataaatatcaagggattagataactaactgctataaattaagggtagtctaaattataagccctgttcattaacaagtataaaataattgctttagacaacttaaaagatgtgtgatatggacttgaaatcacaaaatggaagtttttaaaattattctgtggtcactatttcctttaagctcagttactcagtgggaattaaaaacctgccaggacttcttcagtgatacaactcacgatgcttttttaagggaaattactatggagcataaatttttttttagagtttcacacctttccaaaccacttttttcctgaaggatattgcctactttctgtagctctaagcttaaatgtggtgccatttaattacatacagactaataaagcaagacatatttaaatgtaattttgtagcttgtacacataaactcaagccagtggatgatgaaatgctgctaaaattatccttatccagtaaaatttattgcagtgatgaaaatcttgacatctattccaaagttcaaattaaactttagcgtaatagagtagcctaagttaaaccaaagtaaataagcaattatttatagtaattgcatgtgtgtgtgtgtgttgcatgtatttaacttttcagaagaagtcagtgaacccacattgtggggaccgctgaattaattacaagcgtacacaaaagggtatactcttcaatgatctcagcatgtcactttgaatttatccatctgcctaatacccacctgtctagttgctctttcatttaaccacatattatggcatcaatattaactttcagatttgggtaagaccattgccatttcccaagctatttgcctcctaataaacacagactgaaggggaagtgttgaaagctagggcaatatttttcccataatgtttgatacaaatcccagctgcacaacattgtatgttaataaccattatttaattaacagatgaagaagcccttttgagctgctctggcagattttgaacttgatcttctatcatttgatgtcatgcaagaccagataaatgacaagtctttcgagagtctgcagagcccctttagaacagctgcacagtcttcccccttctttgcagcaggtttctcacttaagaaaaaaacacgcttcattacatcgcctcttacttgagctgcaagggtctattcaaggaagataagcctcttagaaatgaagtagcgttgaatttaggttttgagtgacagcaggaagatttatccattcaacagacaataccgctttctctgcattaatctaggaggcggacaatgatctgttttttaggcctcatctcatctctttcccacagcagaaggtgattagagttaggaaacagggactgtgaaagaaaacttgagcgctatctctctagccctcctgtttcctgaaggggtaagagggagcccctaggccaagggcatcaatcacagattcacaacaaggatatgatgctttaccactgggaaactgataggccacaggtataaaggggtgagccccagaacccaaagggtaaggcattatagttaacctcccaaaaagggaagaaagcacaaagtagctcttcataagtgaaagcccttgaattcttcctagctgggcccaaatgaaaatgtcaggattctcttggactgaacatgatattctaccacctatacacgggttaaggttcagtgaaatcccaactagctgatctgccaacagcagcctaaagagagagcaggagacacaaaagaatgccatgcaacatttgagtgagatttccacagcacaaccatttcatctcatttatatccatcttctgcacctcaggagaggattttcgtaggagcccaattattaatttgaagtatccctctcagccaagcactgagcacagagcccattgtgagcaactcgtcacctgctaggaatctgcaaagatattaccctgaagtccagcatgagaattccattttacaggaaatagctggtactatccttagtgtgggaggcttgccactttattagtagactatttgtctatattttgaagtgcagaaattgacgaatggactttagagagaatatggtggcgtcgaacaatgctttcagtttggggcatgcaatttttttaatttcaataggttttgggggaacagatgacgtttggttacatgaatacgttctttagtgatgatttctgagattttggtggacccatcacccgagcagggtacgctgtacccaatgtgtagtgtttgggtactgctactgccacatcacaatatccaggatgccttttatagactactcacagtcttgatcctttttcctttagctcactgtggaggtacatatcaaatatctaaaactaaatgaataaaataaaatattcacctccagttaccctcaaagtatccctgcaccaagacaatcaaaattgggcccaaaaaggtttagaactcagatactggaaaacaagtatgaggcaacatgcttttgtgtgatatctattttcctgaaaaggcagctcatggaggctgggagagactctcattcaagtgtgagtaattaattaagttagtaagtaagcagagagaaaagtcatagacattaccacagaattaaatcaagttgccccaaatgacttgtaaatttaagagcagattgtgtgttctctagaaatcaatatagagtcatcacattttgagatttcctgttgttaaattgtgttttgttttgttttgtttttgcaaaatgtcgtattgacaactagaggcttccttgacatttaccccacgtgatactggaaatatctgttcatcaatcttaaagccactgtaaccagccaaatattgtggtgacaggatgtaatccatgtttcaagtctcctaggaacccaaatccaacaccaacaccaacaccagaatgtggcttgaagaagattctgaaggaaaataagaaaccatcactcagacctctttggaaatcccttatagcatcataacacagaggctatgctcacatagtgaacaggtcttcagaaaagcagtaatgattcaaaacaaaatgaaacaagaaaaggagcaccgaatctctgatattccatattgtccaaatgagtcctgggaaagatggttttcttcttatctctgatcttcagattccttaatgtccatctttatagcactattatcgataagttcttctttacctactgcttccataatcaaaagttgacctcccaggtggcaaaaaaaagcagttcctccaccatcaaaccctacctaatgggcctaatcagctcctaccatgatagtctttattttcttctttcttgctttctgcctttttttttcttttttaattactgaagactcttgttttggagaaacccctaattgcttcattttgagatgttatgtttaacctcaggaaatggtgctataagacctggcaaacagctttctggttgtttcaatcagtaccagattatgaggtccagccgggtaagaactctattcattttcttgccctgtcatcttgatcttatttgaatgtctggggagctggaggtgcttagctggccctggatttcaggactgggggtgggagtaccagggagagctatgcgatgtgttagagacactgaaagttttcattttgactccttaatgagagcgacctttgacacaggctgatgagttccatgcctgtcctggtgtgctttttgaaaacatttgacactggtcacaggtctgacagggatatgactaatgaagtcgtggtataaaaataatgggctgcaattgcaagtcatttgcatgaaaccaaactccttaaaaacttgtctctgttcactttctgttttctaaatgagtcaataatatgaatcagatgggttgaagggaatagactcccaaatattccttctataagtttggtaaattagttggcatttggtgcaatttttgttgccttgaggcctggtttaaattggactgtagttactaaattgctagggcgattgcagaatgtgtaggataatgcataataccttgtttttcttaagcgtttcgtcagagagcttcttgtgaggtcaaggggcccaggcagcgctttgcagaaaatatcaagcgagagtagatgaagaagaaatataaggaggttgtgggggagggagaaaggaaaggactaaataaaagaaaggaaaaaaagagaataaatgtagaaagaagaaataaaacaaataaaaaagagggcaacatggattggggtccaaaaacacaaaaggacaggaacaggaggaaaaagagggagatggggaaaaacgggaaaatgaacgcagagtggttaaagaaaatggggaatagaagaaaatttttaaagggagaaccctaaaagaagaagctaccatgttgacttcagtttatcctgtcaaactgtgtattatttatcctcacacaggttaagtatccactaaacaaaactctgggctaatagcagctcacagctcacacactagggccaatccttcccttcctttgtctctgcacaaccctgccaaagttcctgatgtttcatcctttcacctgtagctaaaaacaccttcagagaaggttttagcaaaacttctgaaattacatttgaccagctgcgtcaggaagcagcagccaggaggaggcacattgtacaagttccttcctagagccttcctcctgtgggactgactattcatgatttaaacacttagggttttctttatgatttgtcagtttcagcacatctatttggaactttgttttgcttactggtatatacgacaaaacgaaatatcatgtgttcccaaacttaaataaaaagaaatacaaatgatttacagatatacacacatagaacaaatgaataaaggaaaggttacatggcacagaggaaattgtacaagaggtttggaaatgaaccagctccagttgctctgtgaccttgggaaattgtcttaatctcactgagcctcagtttcttcaatcacaaaatgaaggattaaaagattgttttacaaagtactagcaaagtacctggcacaccatgagtagctaaaatgaatgaatgagcaggcagagtagtaatactctcttttgtgcctgcctttcaaggaagtatttctcacctaccattcatacataaagaaatcaataataattctacttatatccctcgataacactgaaaatccaggataaaacatgcatagactccataaactaaccgcattgcatctgttggggttgtacattctactcccaaaaacctgaaatccaaacaactaacaaagtgaaacatgttgtcctctctctccccctctatctctcgctttccctccctctctctttctcttcctgtagaactgcccatcacattccaaatctccacttaaatgcttggattagtgcatgccaacccaaactcctatatttactacttctaaaaaagcacaaactaaggattaatgttcataatcatgacttgataatagttgaagattggtaattttttgtttgtttgtttgttttttgagacagagtctcactgtgtcacccagattggatgcaaacagaactcactacagcctctacctcctggatccaagcatgccaccacgtctggctaatttttttttttttttttttaagaaacgaagtctcactatgttgctcaggctggtcttgaactcccgggtttaagcaattctcctgccttggcttcccaaagtgctgagattataggcataagccaccgtgtccagccagtaaatattttaaaatcaattatttgagaaatatttaccgtagcttaattctcaaaaattgatcaattgtggttactttcagtttgtcacaactggccaaatcctggccactgcaagccccaattattctaaatatgcatgcatttactctatgaattcctgctgagagaatattatttcagttatttgtcttaatgaggctcctcagtccataagcaagttttgttattgttactgaaataaagacatagaagatattctcattctaggaaccaaagctaacattaaaagacagtaatagacattagaacaaatttttttaaattaaagagttgtttttttaagaaacaaaatgaagtttaataaagacagaagaaaggccgggcgcgggggctcactcctgtaatcccagcactttgggaggccggggcgggcggatcacgaggtctggagatagagaccatcttggctaacacggtgaaaccccgtctctactaaaaatacaaaaaattagccgggcgtggtggcgagcgcctgtagtcccagctactcaggaggctgaggcaggagaatggcgtgaacccaagaggtggagcttgcagtgagcagagatggcgccgctgcactccagcctgggcgaaagagcgaaactccacctcaaaaaaaaaaaaaaaaaaattacagaagaaaatgaagaatgagttagagaaagtctgggaaggctcaaaaggaggacacttagacttgtagtacatttccaattgaatttgagtatactactggtaaactactgtgtatttctaaagaaagtgggacttaacaagtgagtatgacatttggcagctgagaaatcatcctttctctgtaatcaataatgctaaagactatatataaagtggtccacgctgcccagcactgtattcacattttaaagaatgaagacactgaaaatgagcagtaccaaaaagtactaagaggatgaaaactagatcctaaaaggaaaagacaatataaattctagttatttcactagaagtgttcaagaatcaagtgcgaaaggatcttacgagaatgatgctgactagttgtctttcatttccacagattatcaagcaagatgaaatgggaaaatggatagaacataaagaaaatcttcttgacagtaataaatataagaacatttttaaatattggacaagatgaccaatagaggttatggattagaggtcttagaaatctttttaaaataggagcaatgaccatctgtcttaaatggtttgtgtctttacctgcctggaggccaaacactgaatcattaccaaatgtatggttctattatcccagagattgatgtcattacctctgaagtttaatgcaggggaatgggacaggcaattgaatagtgctgaatcgaagatttaaggattgaagagatgatgatacaatataagtgtagcatttaatttctctaaaactccagagaaaataattctataaaaataaaagtttgtggaagttctattttgtattttaattatgtgtgtatttggctcatttcctttattaaaccataagcttcttgaaggcaagagatgtatatttctcctcatttcgcctctacctcaccaacccacccaaagtccctaacaccagggccaagaaccaggtattattaccaggtctatagacacctataaggttatacctgtccatgccctgtcagactggtttgctgcctggaccgcagaggttgttaactattttaaatattcctacccatcccttcttaaaagctgcatcttcatgagggtagggagttttatctgctttgttcactaatagcacctgtaacagtttctggtatatagtcaacacttaataaatactggttgaatgagtgaatgaataaatgaatgattgccattcaatacacttcttgagggctatttaggaataacaagttttttaaatctcccaaacagaaaaaaatgttaagaacattcttagcaggtggttctgtatcctgggaggcaaatccatattaattctaacatttttgtcttccttctccctatcatattcctatgcaagactctacaaccacaaaattgcaccctgtatttcaaaacagagaaaacatttaagatcaacagtcttatgcagaataattaactcaatttctattttttatattttcatttcaaaacttcaaatagttgtctaatcaataagtggttttaaatctacattttcctatccatttctttgcaagtaaagtaggaatgagaatacttgctcccataggggaaacacataaaaaccatagaaggttatgaatatactatttagtttaaatttttttacattataaaccacactctgcattcaaatttccatctttacttttcccatacctttatattttaagcatctaaagccaacaactgtaatagtttgctgtctagttagcataatttctttattgccttgggcatagatttgcaatgtaatataaataacaatactattttgcatggctattgtacctctggaaaccctttaccaacattaattttcacaaccgtccttaaggaataggtgatcactgatattaaggctcaggctaatgaaatttggcttaaagaataatatattcgcaaaaaagttttaatttaccatttgtcagtttagtgttatatgggtatgtatttgtgtttcactagatcccaaagaaagcatttgcctttgtaacatcccctaggaatatataatttcaatttagattcttcacttacccagacaggagactgaattctgtttgtttgttttaatagatctctatgtctaccttacaccaaagctcagtctgaccagatacacaagtgaaattattcagtttggtcagttcttaaagcataaccatctggtaatgttctctgcgcagcagcttttagaaatagctttccacttactaggtatcagcagttagtgctggcatatctgtagtaatcgtagaagaagtaatcatagtactggtaatattaagtcacatttattgaggactatgtgccagttcctgttctaagcaccttacatgtactaactcatttaactttcataataacctaataacagcagtgcagttattatccccacctttccagatgcgggaacttggacaacaaaaagaggttaaataattgcccaaagatgtatacctaataaaaggtggggtcagcattccaaccaatatttattgagcatctaatttttttgccagacacttcacaatgctttcactgcccaatatttcctgtaatacagaaatgatcatactgtattttgattcagcaacatttatcaaaaagcctggagctgtcaccaaatatttctgataatcacatctctttcctaaaacaatgagttttaagagaacagtaacattttttgccattggcacatatggcatggtttctgtcaaagggactgtggctctttatcacatgtaaacccacacgccaacacacacacacacacacacacacacacacacacacacacacacacataaacaatcacctgttgaatgggccaactcaaacaactggtcagtgaaagctggggaaatcagtcaaaccagttatttgacaccttgtagaaaaaaaagggaggggagatgcaaatattgttggatctaattttttacgttttaatatcctgtaccggaaccatgcaaagtaatgctagaacctataaaatatttaggaggaacctggtaaggacaaaagatagtttccaatgctactctaaaggtgtattgatttaactgcaaacagttacattgtacactgtcatagcctaatgcttcatggaacaaagagtttccagttgcgtctccatgtcttttatcttttaaaatgcacttttctatttgtttacaaagttctattattcacctgccaggaaaaaaaaaataccaaatttaaatgaatccctttatccaaaattaaatcctggccttaaggatcagatccagaattagccagaaatatgcataaactccatacagttccaaattaatttgttaatttaattaccataataattaaaattgtttaccatattgtcatcagaaaccagaagaaaattataagtaaacagaatctttattatttgtattaagcaaaataaaattacataaagagagacctggatatgtagagtatctttcatcttcaaagtagtttctatatcttctgtataatattacagtattcaatgtaagcactcattttatcaaacaacagagtaaataacaaaataagaacataaagtgacttgctggctatagatgatgacttccccaaggctgccgtgacttatatacctttctttggcaactccttttggaattcttttttattttgccatagagatttttgtgggtgacttttattttgttttgttttgatactttcatgagctacaatattatgtggttctccccttctacaattcgtcccattaaaagttctgtcatcctgttagacatataagtgacatggtggccagaattcaggggtgaagggaactgaattttgaaaccacacaatttatgtggaaataaagtacattcctcatttgtttctgcgtcagacatatgggaagactgtgtataataggttgtttcatttgtgtgatggagagatttttttttaagccttctgaagaaaaaagtcatactgatgtctacgttcatctatgcttcttttcccgtgttttaatgtggaaacattttagaactcacagtttccacacttcgtacgttttccacagttaattaatcctgctttccctcatgacaaatgaccctatctcataaaaggacacattggcaagcaaggatttaactcaaagaagctgttctttgatatatatgtatgaattgggtttttttttaatttaaaagcactggactctcagaatatgaaaatgtactacatctcctacggaaaagtaaatttggaaatcttttaggtaaatgaaatacatagggtttttttcttgtcttcaagaaccaccatgtccaattagagggctgggaagtatgactattccatatctatatttttaagtctaccataccttgtgctctcaactcagaaaattcagaaagtaaaccctactcaaatggctgtgtggtagcttctgaaaattcccaatgcaaatggccctcttttttccctcccaactctccaagtcttagggaaagaaataaactccgaattattaacctgttgctaattttccctattactcaatattaaatgaagatggagaagaaggccccaggatattaacctaggctgtccgcttcccacagagacacaaggctttgcagcataagagctagaagggtgaatgacaccactattcttatctctaagaagtaactgaaaatttcatagattgacaataggccaaattcggccatcccatatccctacgcctctctagagaccaggaaggcaccatgttagagtagattctactttaaactttataggtaactgcaggtcctaggaagtccatgccacctctcagggcctctgtttcctcatttgtaaaatgatgtggatggaaaaaacattctctaatgacccctcagctctggcattttatgattttctcttatgccatgtaatatggcatgctattccccactgtctcccctccccaacccccactgatttattgctgaacagctagtccatacagcaagctctgggcttaacctggcctcacttgcattagtagaagcaagttatttctcatcttcatcgccacactgcaattccgactcacatagaaaaatctatctatctgcctacaaacctatacatccatctacctacttttaacaaatctgtgttcaaatcacatgcaatttctgaagaaaaattagtgtttctaaggctgattcccttggaatcactgcaacaattttgtcacaaaagacaccaattgagccaacttgcaagaccctttaaaattcaggcattctgtcttcactttcccttttattcagcactaccctttcttggcatctttggactcagaactatgaatctccacatgccttccattttgttccacatctggacaagaggcaggaaaacaacagatcatcaacaagttcaggtggagtttgtttttgttttggatttctataaacaagaagggaaaacaaactctaagtaagcattagtttttaccaatttatttttctaacatgctacatctctgggggaaaatatctactgatttgatgaataagtatgaagttgggaagcctgctcttataggcatgaggtaaataccaagatgaataagatgactaaggaagctaaaataggtataatagcaacaatagcaacagcaagagatattttgggttatttgctctaccttagaatcagagtgcccacaccgatacatgagcatacctggcaaaatctgctcccacagaggaatggccagtgcagaatgttcttctctaaatggttgtcagaggccaatttgttaagactagaaatggagaaccagaataagaataaaatccttttctcgaaaattcaggcctgtcacataggtacaaaggaggatgtatttttaaaatctctgttgtatgtcaggcaccatgctaggtacttctatatgcatatttcatttaaccttctcaacaaatcaacagtgtgattctcactttttccccattacataatgaaaaccttgggatttttaaagtccacgcactgccacttgatggtggatgtgaaataattgtacattaagattattaagctgctgcagctagataaaatatttaacaagtattaaactggaagtgatcatgtgaaatcagttttagctaagatactaatctagaagttactatctgtactaaagacagcaaaatagaaagcgtccctaccagcacagcataatgcaaaacgcaagcaaggacaactagtagcaggccttctgcagaacctattagagaaagcaatctgctttagaattgatggagattccctaatcaaagtgaaattgagcaaattcctaagccagatggggagttttctgctagcaagtcatcagaaacaaggatgccaacttgatcctatggaaaggcacagtacaagaatgacatggaacactacctcatcgagaatagaaaactccagaccctaccaggactgtggcaatcctctcagccctctcgcttattagtggaggagaactgggaatcaataacagaatccttttgtacatcatttatatctttgtacatgtaattatacttaaatcaacaaagtagtaaactttatattactcctaagttataatgtgggtttagtcattctctgattcaaggaaatgttggctttgtaaaaccaaaggtaaccttctgctgttattttgtaggctgtggacggagaaatccctggaatgattggagagtcgagagtcggatgcaccaagccgagagagaaagccaagtgcaccgtttagcaaatgatacttagggtttatttctctttggttttttgctccatgttacacacccacatacttgtaagacagagcagtgaatggcctcttctgtctgagtccaaagcccacactctgtctgctatgtcacactattatgacatacagccattaacccgtgctaatcacctatttcacttgaatgacccaatataacaatgtgtggatttgagagacaatctcatactaaaaacaaacaaaatgaaagagaaacctgttataatatgtagagtaccttattacaaagattcagaaccacaggtcaaatagcatgctctccggcaacaatatgataaaattctttcctaaaaggaaaattccattgaaaacaagcactttttacatcctaggagatggcccataacaacagtacagtatagagaataattttccataaaaaaatactcataaaatcaatgctgttgttttttctggtccccacccatttcatcttcattttctagaaaccaaactgaaatgatgtggctgtttacactttcagaaggagagaacacagaaagctgagtgactgtgactcagagattttgttctacccccgaccagcagttacccttcaaccagtctcgctcttcatccctcacaatgcaaacttcagagtcacactgccagaaacaaacccaaataattcccaaacacaccactagaaacccaaacaaaacactagattaaaaattccagggtgtctgctgttcacaaaaacttgctggctcaccagcaaaaatctgggcatcagcactgtgctgtccacaactcctaaagacggatgtggctgcctccagtccagaaggcctcttcctttctgactttcacattattcctcagccaactgcagcctacttggccaacattattttcctcaccctttcacagacagcctccacctcctcttactgccctcacgcccaccctgcccaactgggttgtgtttatcctttccttccagccttctcctctaccctctggggtgtccaccgccctctcctctctagttcccctaaatccttgcccaatgcccagtttaggtccagcctttactgggtaacttttatccaagcacatgagcttctctctgccctgaaattctagaattctttccacgtagggcacagaatcatgaagttcaatttctctagttgttttttatatgatagtctcatcttttcatctggattaaaagtccacatcttagagtcccttgccatgccctccatctcaattagggcacttaaagccaaacagctgccagcattttccacaattacatgtattacattacagacacacatacacacatacacatatacacatggatacatacttataaatctatacatgatatgtaggcatgatatgtatttacacacacatcatgggatatatatgtacataaaaaatacggtgtatgtttatatatctaagacatatatgtatgtataaaacatgagatacatatgccttcatttattattcatttgtttgtttactgattgtttactaaatgctgatagaattttttaagaattaaattcctattgagaaggggtctcgctatgttgcccaggctagtctgaaaatcctgggctcaagtgatcctctggcctcagcctcctcagaagctgggactacaggcctgcaagactgcacccagcttggctgggttaatagagtattaacactaggaaaacaaacgcagaaatgttgtagcctcatcctgcatgctgtctgtagatgggaaaaatcaaactcagggaaattaattttttcaagactacacttggtagaaagcaaggtatgagaaggagctaacaaactaaattccacaggaaaacagcataaatattacagctagacaagaacgctgatggagaaaatttcccaatagaggaaccattaggggttcctgaggcaaatataccctatacagtgcagattgtctatatatgtagctcactatggcccatgacatattagcatgtgaatctccttcagtgttattgataaaaattcagattcctcaatgctatctgagagctatctaatctgaatctccaggtaaggtccaggaatctatatttccacggagtcccacaatgattctctgcacaccacagctgagaaccactggctctaccctatatcaagctgacaatgagaaagatataaaagactaggcagatgctgctggacttgagatccccattcccaaggagttaattcaaagacagtcattgctcataaggctaaaccaagtggtccaatttcatttgcttattcttcattcaaaaaaccacttttctaccaggcacagtggctcacacctgtaatcctggcactctgggacaccaaagcaggcagatcacctgaggtcaggagtttgagatcagcttggtcaacatagtgaaaccttgtctctactaaaaacacaaaaaaattagccgggtgtggtggtgcacgcctgtagtcccagctactcaggaggctgaggcaggagaattgcttggacccaggaggcagaggttgcagtgagccgagattgcaccactgcactccagctgcactccagcctgggcaacagagtgagactccatctcaacgacaacaccaccaccaccacaaaaaaaaaaaaaaaaaaaaaacaccttttcacctaagtacctcaaggccctccaccaaaaaaacaatgctctcttaaaactagctgaccctttgctctaagcataaagaaaaacagaagcacatgtggcattgtgaaaatgacctattctcaattttctatgtctatctagagctgtggcattcttctaattttttttcttttaacttagagttcttgtccctaaagcagtggccctcacaatgtagtccctggactagcagtatcagcatcacctagaaagtcaaattcttaggccccagctcagacctgcagaatcagaaattccagggggcagggccagcattctggcttaatagacccattgggtgattccgatacaggctacagttcgacaaccactaccctgaaggaatactgggagaagaggagtttccattagtccttctcaagtctgagcctcctctgcttggggaaatgggaagaggtgaatggcaggctgagcaagggagatccaggcccatccgctcccactagtccatctgcaggcatttcacacagctggctttcataacaaagcttatcctgagtctcaaagttgatactctctgaatatcaattgataagcttaccaacatgttaaaacaacaaggcaacacagcaggcctagtatggaacacaaataaacgtcacagaatctgaccttaaaagctggatctaactgaaaaaaaaaaaaacaaaaaaaaaactggatctatattctaaaattaatgggggagggagggctggactgatttaatttagtgagaactgtttcttttaagtgaattggttgatttaagtcctacaaccagtttctaagcactcaatttcaaattaaccagttgcttgaataaaatggtgaattttctttattttcttcaagacaggctcatgtggctatgacctgaaatcagtgattaaagaaatgcttaatggtatctgcccattactaaattattattattaattaaaagtttaaaaagaaaacaaagcttacttttgtctactaatggatacagggatttaatgttacaaattacctttctaaacccaaaatgcacaaggaagtgaagtatacgtagaaaattcatctctaaaagcatactacccaccaacgactacctaatttagcagaatatattacctctatgcttcataaatcttaattaaagctgttagttttcctattatgtgatcgagaaatgccccattaaagttaaacagtttctacaagtaattatacacatatacactttaaaattgcttcatatatactggaaacattgtctactaaatcaaaaacttgcagaatttcattaatgcaagatttttttatctcccaaaagtcaaatgtgtcccagaggaaccagtatactcagtgttggcttcttataatacaatttaatgctcacaaacacaactaaagtatttaaacatttacaggggttgtcataaatgcttttcttatttttgatcaaattcaaccttacacttaatacagttaactgtagttatttaatttaaaaacttgagattccaacctcaaaaatttataacaatataaatgcagttacttggctataggatacgtatactgtggggactccattcttcaatatgaaacacaaataccaaaaccagagaggtagtattttttaaagtagacattattttaaataacttttggcacattgaagaaaaaacatcaaatccaaatacaaaaatagaattctttcattcatatagtcaatttcaatcagacactagcacaccaataataagaataatgtttatatttttctgttttgaaaaataatacaagatgaatcgataaactagctaattgaaaatataatgttatttgagggattctagacatcctaactgaataattggatggaaaatattattgacaacttctccattttctcaaaaggtgtagtttatttaattcattgaaatgttacatgtaactctttaatattatacttccgagagatgtgcaagtttcatcttcagaaactgtcactggccttagaagaaaacacttagatgtaaactcttgtgccaagagctttctgtcctggggcatattggatgagcacattcacagaacatgaaacaagagaaggaagacagctgtagcccaggcggtgatggataacccttgatcgggcaaacgtaatatctctgagggctgaaagtacattattaattgaaatccttggttagttcctccttgtagaccaccatataattgcatctctacctgaaaaactgttttcagcagaattcataatgggtaaagtgtcctcaaaatgcatatgaaggaaatctattttgcgtacaagtgattatatcacaatgtacacattacagagacactaaatccttatttccatgactgtacacagaccagaaaataaatgcaagcagtttaccgctcaccatacagcacagtaacaattaaaatgctgtttgatcaaaaattaaaacctaaaaaacattaaaactaaaaaaaaaagactgttccatagaattagtgtttccagttagcaacaaatataaatgacctcagtgtattctgatattaaatacaacctccccaatataaatatcttatagttacaaataccttagtttaatgaaatgcctcttcttttgtgactatattttatgaatataaattggactagtcaaacacattagcatttttttcttattcaaatagagtgtatcaaatcttgctggtttaaaaagaaaaagtttcttaggacaatgaaagttttatggggagttgaggggttggaaggaggtgaagaggtgcatgtttccaagctagggtataggaaagattaaatatctcactgaacttcagcctgacatggaaaagtaacatcacctaaaatctcaatcttatcaaagtgtaagatgaagtaaaatagaagacagggatacattaagagatgttcaacataagttttaaaaataggtacagtaataatgcaatccactaataaactgaataaggagccgggtggagagtctaacaaccagtcatactaaatgacagctcagagggcgaagaggtgtggaaactgagaagatagacttccaagtcttttcctgaaagtgcttagattttgagaagagtccaatattgtcagacaaaagagtctttgtgcaacaacaccagggaggtgacggaaagctgctcaggaaaaccaacatagacagccccagccttgtacacaggacccgtggagaactttgacttatggggcctgcagaaagaacaatgctaaatgcaagagcatcatattcagccaatatcagaatgggcacagagcagatgagcagatgtctttaaaaaatcatgttgggtttttttctttcaaaaaatataataagcagatacacagactacaatttcaaattgcatcagtagtcttagactaggtcctcagacatttgaccactctgggtgatttaacctgcctcacaaaccttgatacctctggttggcaggggctctgattttgagttcttggtgaagtggcaaaacagctcatgagggagtatcaacacacaaggcctaatatcctgaggttcctgtcccagaataatgaaataggagcctgttattattaaaggaagactggtgtcatacagagacaatttcaaatagagaaatacacactaaacatggatggtggtccactgtttattcaaattcaggatatctacaaaaacttaggctgtaaatcaagtaaacacatcagataattggcacttccagcgttagggagagttgtccaagcttttgcccctacaggaaaccataataaataagagaaaaacacccagtatatcaacctttctggatcttcaaaatagagctgcctcataagttttaccaggatgaaaatattaaaagattcataataagggtacaaaaaattcatttttctccttcaccatttccaactgccctgctatcaatctgaaaataatttaagtgtttaaaggtatccaataaacaagcaatgtccttaaataaactttaaaaccaggtgccaattttaaattagcattagatgcaattttatcttaaaatggcatcttcgcagctgtaatttccatcatatgaaataaacagcaagttataaaactggctgaaaatttttcaaaaatatacatctgccaataaaacatacaaaaaagattcaatctcatacaagaaccaaaagaaaatagggtgggagggtttactgtggaattaaaatgtaagaagatagcagaacaaagtcttccagtaactattttttgtagtgctaaattctgtggtgtaatggaaacagcatgatgtcagagacagaagcctggttttcaattctaccgccaccttgaactagccatgggatcctgatctgtagatttacttcattcataaaggggggtaatgatacttttcgtctgagtgtagtatagtgagcaatttgcaccgcagttggtgcatataaactcttaataggtattatctgttgacgttattatcatcatgagttgctagatcagatcagctagcaaagagaagggtcttaagaaaacaggagacaaaaatggatccaaatgaggccagagtgaagaagaaaatatgggactaggcatcaaaaccatgaaggtcaaaggaaagagaagagagaaactttggaaacatcacaggtcagactgtgaccttaatgaatatgatatgtgactgcctaatagaattgttattgatatgacacatgtagctttagaaacaaactacactaaatgcttgcactgggcctgtacctgatcaaaacagacatattcattcataccactctgcttccatcattcagggttttgataaaacgttaaacctcatcctcacaccttaaatgtaattttaccaaactaaagtaaactgaagtgagctacaaccgatagcgaagaaccctatacgcattaacgtgagccacagtttaaagtgtgtcccctttagcataaggccgggcacggtggctcatgcctgtaatcccagcactttggaaggccgaggcgggcagatcacgaggtcaagagatcaaaaccattctggccaacatggtgaaaccccatctctacttaaaatacaaaaatcagctgggcgtggtggcgcatgcctatagtcccagctactcgggaggctgagcaggagaatcacttgaacccaggaggcggaggttgcagtgagccaagatcaagccactgcactccaacctggcgacagagtgagactctgtctcaaaaaaaaaaaaaaaaaaagtgtaaacctgtatatggaaaaactacatagtgaaagtctgctatgatacatttaacttttagacaagaataagctggttcccaatataagctttgtgaagatgttccattgtaccaacaatcaattctctcactgggaatggttgagaaatggctttgttgaccaagtgctatactacacataaattagcaatttgcaaaaagagaaagaataaaagggaaagaatcaaatacactcaacaccacaacatgataaatatgttgattaattccctgatcattcaaagagatattcaggaatttcaaagactgtacatcattataatttcctttgtcttctagatgtaggaacctgccagttaaaaggaagtcataattaacactatgccagttgaagatttatgtatggatatatgtaatattctgcacaactacctcttgacttacttttttttttctgagacagggcctcgctctgtcccccaggctggagtgcagtggtgcaatttcagctcactgcaacctccacttcctggactcaagccattctcgtgcctcagccacccgagtagctgggattagctgtgtgtgccaccacacccagctaatttttgtatttttagtagaagcaagttttcaccatgttggccaggctggtcttgaactcctgacctcatgtgatctgcccacctcagcctcccaaagtactaggattacaggcatgagccaccgtgcccagccattacttataaattttttaaactgagattaacataaaatcatagcaaattataagtactccccaagggattaaaaaactaagcaaaaatagagaaagtcaagaattagtcacccatagttttctcaagaaaacagagtttaaatatataataggaaggtagaaaagtaggcactatatctacaaataattcacatgcacacgtatccctaaaatgtgctaagtatcatttagatgtccaaaaacaagaaacaccagttacccaggggccatgattaattttctcccttcaagaggaactaggtctgcaaaaggcttagaaattggtagactcaggcccactccaggaaactcggctggtgtttccattataaaccgcatttcaggagtttacaagttgaatgtttttaaaacatattgggctcataatgagctcacacattcttaaaatgttctctttttgctctcctttaaaaagtatggccacttttgtgaataaatcataaacaaaatttcaggtgattatttttggctgagctccaagacacaatggctaaatgtttgaataaagtaaaaagactaattattttcttcatttggaaagtagagtagaaaggccagcctgagaaacactccacaggacttccgttttaaagcattcttttgcaatattttcattcagtggttcaagatcctaggactgcagctaggaatatgcaatcaaacttcaaaaactccatttctacatctggagatttatgcaataatcgctccagcattagacttctctaaagttatttgtggtcaaaattacatgtaccatgaaagccaggaagactcttagaatgaagctaaaagccaggtggtaaggcacctacacttaggtgtcgccacaaacccaaattcaaaccaacctcatagttttataagccttttccctgtgccaactcccagcttaaaaatagtccagggcaaatctcagcaaggaactgagttgatgagtaggttaaggcttaaaaatcatttctttcagaaccagggggaaaagaagaacctggaggttctgccgaatatgaaaactattctccacagcatctctaacaccttttggggtttataaaagaggaaggcagcagagatgtcaaagccaggcatgcctcattcccacaaggaatagagcactgagtgtaactcaccaggcctcttacatgggaatgttggatggtacagcaccattgagttccagaaggatggtcctgcgccgcagtagaaaaacaccttgaaacaaggtagctttactgctaaactctctcaccatgcatggctgagttcagctgctgaggaaaaaggtgttctctctgaacctgtgaattgacaagattccccctattcacagaacaaccttccatctgcaggctcacgtcacacttagaagacatgaaaatgtgccccatcccaaaagaaagaatcacataaactttctaaattgcaactatgcaaaagacacaagtaacactgattaaaactgcacaaattccaaaatttaattgataatattctacatgtaggttaaaggttaaaaataccctgcaatgctgctatatttattgacaagggcaacttttccatctgtttctaattttatccatgattggtcatgagcctcaaaagaaaaatccactgctgacaataaatgaaatgaaatttgcactttcctataaataccatcccccttcaagaagaggaacccattaattaccacgtatggggaaagaagaattagtatgctaatgcatactagtgtcctaaatattgttcttgatcaataaacacacaacttcaaactcagaacattagaaacagagatatactctgatttgaatggtggtttaagtaaaaaaacttatgtatctgatatttggtagatggatatggcacctttacacaatgagtagccagcagccaactttccaaagattatgaacttagagagatgttctctattcgtcagctagcaaatgactaacttttccagatagccttaaccacctaaatctaaattatggaaataatacaagaagagaggctggaatcgggggaaaggagcctttatgctcaaatagtatttttataccccttctcactggctagtcagggacctgactcctttatccaccaatatcagatttctcaacctcagcactattggcattttggcccaggcgattctttgttgggagctgtcctgattgtaggatgtttaacagcatccctggcttctattcactagatgccaatagcacaacccactagaggctgcctactccttgtgacaaccaaaaatgtctccagacattgccaactttaccccagggagaaaaatcatctctggttgaggacttctgacgtataccaaaagaggaaggaaatatttagtcaaaaagaaaaaataaataacatttaaaataaatctgaaggcatagggagtttccagaccccacagagtcctcccttccccaatcactcatgagctgcagagctatgaaagtaatccacaagattgcaacttacaaaaaaactatgttctgaaagttttgaaatgctcgttagaaacataccaccaattttctccatagaaatgtttattatatgtggtgaataagttcacaggctagcccccaatacatatattcactcatatatgcacatagacaaataccacatacacacatatttaacttacagggaatatattattgtaatatcagtaattaaataccatgaaaaataaatattgaataacaaattatatacagtcacacatcacatcatgaggttttggtcaacaatgggccacatataaaacaatggtcccataagattataacagagctgaaaaatgtctgtcacttaagtgacatcttgatgatcctgaccctgcgtaggcctaggctaatgtgtgtgtgtcctagtttttaaaagaaagtttttaaagttttttaaaattttttaaatagacaaaagcttataaggtaaggatataaaaaatatttttgtacagttgtacaatgtatgtttaagctgttagcacaggagtcaaagtttaaaaagtttacaaagtaaaaaaaaattaccatacgctaagattaatttattattcaagaaagaaaaatttttgtatacatttagtgtagtctaaagtgtacagtgtttataaagtctgcagcagtgtactgcaaagtccagggctttcacattcactcaccattcatgcactaactcacccagagcaacttccagtcctgcaagctccatgggtagcaagtgttctatacaggtgtaccattttttcttttacactgtatttttactatacattttctatgttatgcaattgcctatggtattcagtacagtaacatgctgtacaggtttgtagcctaggagcaacagggtacaccatacggcttcaatgtgcaataggctaaattaaggtttgggtaagtacactcaatgatgtacccacaacaatggcattgtctaatgccacgtttctcagaaagcattcccaaacatacccctgtcataactatgcatgactgtgtttgcttatctcaaaacttaagaaaatgtcatttttactagatttatcagactgacagagactctgtagagagtctgaagaagctttttggcactctaagatctttggcagttaggagccctggattctttagggacagtttttaaagtttctaaggaagtttgtgtaattgcctttttctctaagcgaaaatttcccttagagaaagaaaaatgatacggagtggaggggagcagctagaaagagaaaagtattaatgagtatttgtgtgtaagcatgagaaagatttacctgcaaggcagtttaaattaactgagctttgatttaaatatacaaaagagagagaaatctctctctctctctctctccctccctccctctctctctttctctctctctctccctccctccctccttctctcattcacatacacatactcactagctcccctgaggggatgccgaggagtacaatttgaaaaccaccaatttagttcatgcttctcatttcacagacgagaaacctgaggtgtagagagattaagtgactggcccatgcccttgttaatgatgggctggaagaaagactctggctgggactactttgcatttgtacccctgagccctgtggaagcagctaggcagaaaactagactggaggactggacttgtgcagggaagagctgggagatcatggggtcagacagctgaagacacagggagcccaggaagtgtcagggacccagctgtcctctccaaaccccaggagtgggaccaaggacttacttccccagggctaccaagaggcagtctcccagaagagctgccctctgaaagggccccaaaacatcttaagaaactcaagagggacttgcagggcatccttccatgagctgccctctagaggaagttgacagagaacagaaaaacctcccatccctaaaagtgggcacatgacaacagaaaatgaagctgttggacattgagcttgtagaaacagtattcttgggggtatctcatttttcccttttcctcacatgtcttcatacccatcgcagcatgaatcctatttaagacagaatgaaattagtatctctttctgcttgatattatctaaagggcaagagtagaaatgctggtctttgtttatagataccattaagaaacacatacaaattcccagaggcaacattatacggatggaaggtcagaaaactctgagtgggaggtttagtcaattgcagaaatgccgaaaaaaataacctggctctcggattcctagacacaaaggtaccatttaaggaaagaagatgatatatactgcctcccaagtaactgccagccagtagacattgccttgagcactggacagaacaagtttagatccacctctgaaaaacaaacactttcagctatttcatggtagctgccatgtcccttaagctttattcaaactaaaggaaaactacacaaaggaaaaaagtagagttatatatttttaaactcagacacatgctagctcttactcttttttctgtaggcacaggggtaatagacattaactctggaagaaaagagattaagtgacaaaattttgtctgtatcacagaaatgagtaacagtaaccctgttagccctgtgtgctacagtgaaaactagacaatgctggagggtgccggtctgtgctagacgacaagactaagcaagacagaaagagtcccactggaaggcaggaggtgatggtgaaggaagagaagagtgaaaagaatgtcgtgtgatcaggtgaggatgcagtaccactaagaacctatctaggttgccctgagttgcctataggctaaatcatcaatgtattgattgatgctctggaaccctatgtgtcttttcccagagattatcattaatcttaaagtttacccaacttttttaaacagaagccatggatatcatgtggtaagtaatcatggtaaactagttttcataaatgatgtaacgcatttgatgctgtgaggtaaagtgaagtttatttatacctctgaatcttgagtgaaatatcatagacagaatgagagagatgactctgtaaagaaaccagaacctgaaaatgtgatcattttccaagcaggtgaaagttgactggtaggaccagtttaggagtggaaggaaagaatgattatttaacctagcccagatgccttatggttaatatttaaatattccaagtggtatccactactttgattagaaattaaaagaggccaggtgcggtggctcacgcctgtaatcccaacactttgggaggctgaggcgggtgtatcatctgagatcaggagttcaagaccagcctagccaacatagtgaaaccacatttctactaaaagtacaaaaaattagccaggtgtggtggtgcatgcttgtaatcccagctactcgggaggctgagacaggagaatcgcttgaactcaggaggcggagtttgcagcaagccaagatcacacctgcacttcagcctgtgacagggcaagtcttcgtctcaaaaaaaaaaaaaaagaaaaagaaatgaaagaaattaaatgatacccagtgttttaaatgataaacgtgttggtgtgcttctatgtgccagcctatgtttggtgttttacaagtattagatctactagttagcatacagactaagctgctgaaacaaaaccaccgcaaagtacagtggcttaaacaggaaagaaatgtctttcttttttgtataacagtcccaagttaggcaggcagtcccagacaggtaggaagctctgctctgcaagaacattcagggttccagattcctcctcgcttattgctctgccatctcctagggtattgttctcctccatatggtcagagctgactcactaccatccatctactttcccacctgcaggaagggagaaaagaggggaaggtggacaggaagcttctttttataaattgcagataatttaaacataattctgttcacattctattgaacagaatcctaatggcatgatcatgtcttcctccaagggaggctagaaatgtagcctataactgaatagccatatgcctcagtatagctcaagtcgtagtgttattaaaaggacagagaaggggaatagatattgggagaaaatttggagtctccgccattttaacctcattgaactctttccacaatcctgtattataatactttaaaaaaagttttaattttttagatacttacggaggcaatataatatctttataaatgaacaacacacttgaagctgttaataattctcccaagcgccacagcaggaagtggccaaggtagaattcaaactcaggtttttttgtctcgatatccatcttccttctaccacgctatgtacagtgtgcctaatgagtcttactccaacagacaaagcacataatatgaaataaaactcatgccatgtggcttttttcttaaagccaatgtctcttcataaaataacaacaccagcagaaatatttgtgtaagaaaaaaagtcagaaactcctttttagaaaataaaaagttgaggggagagggaaattgcaaggaatttattaaaataccactacaaaagatacttgaaaaaatttatttttctcctaccactataaaacaatcaattttggtggtgttgaccacaaatcgtattggtaagaatagaaggactcacgtggaatgactttcttgttattgaatatccataataagctggcatggaacaatctaaaacagcaatgggtctggtttggtaaagttggtgtgatgtgtgcacacacgtacaaacacacaccctttatgaaatagcattactgaatcctgctataatcttaaatccctacacacctgaatgcgtctatgtcatgagataaacactcgtagaataaaaatttactatcccacacattcattaaatttgcgtaagcgctttcaagaatggaaggctctgcttggggtggggttttatcccctcttccttcccctgaaatcaagagatatattttataatctacagccagctctctggcaaatctccattcttttcaacctgacagactgtttgtcagttaaactccccttgtcatgtatccctaccactgccaactcatgcacggagaccttcacttttactgctaccacttgcaccctatgcaacctttgtcattgatcactgatccgatccagtgcccacatgttcttcaagtgcctacacaagtaatgaggtacttgtggtgtaaaattaaactgtcaactgtcagcgattgataaccacagtgagagctgacctagaacacctgcaccagtggccaagacaggtgtgacgtgtttgatcgctgaggcctgctagtcagtctgacctggtgctgtccctccatgggtttccttgcatttcagcctcccagctttcctgcatacccctatgagcatccctagtttgcagaaaccaccctcacagccaattcgggcagctgatcagagtggccttgaaagcagatctcgagtcagtaggttggtttgaaagtaatatgacctagagattttcaaaggtggcatctggagtcagcctggtgttttttcttccacatttccccacatcccctcctaaagcgagtcttggtggcaggattcacacataccatcctccctccatttgtgtttccagtcatgtaccagtgcctggcaaaaggaccttcccttcagggcaggcacacggcagttattaagagtctggtgtaaggatgaagcagtcctaatggaactgccttatggctctgagcatttgcttaaaggcatttaagttgaactggctcacgttctgttaaagtacgataaatgcaagcttttcttactcatatgtaattgaataacctgcacaaaggaaaaaaacatgttctgctctgactaaaattgtttttagccagagttgttgcacagcatttaaagtttttatttaacagttttattatgtaaatgagtaatagatttttttagccttaagcaaaaatgcacttacagacctaaaacatcctttgtgaaaaatctgagacgcgtgatgggattctcatcccattacgccatctcacccgcaccaaacagttgcactatattaagttcatgtgatgagaagataaaaatctattaactttctgctgaccttatcgacacaggaatctctgcagacattacaaaagccatatctcttctgacttttacatccagagcctcatgctccaaagtcccaaaccaaatgtaaaatcttcatgatgagtgggaccctgacaccaattcagattccaggcttgctggcttgcagtcaatggagcctcctctggggcacagaggctagcctctactttgcatgtgacttgaggggccttttttttgccatatgctactggggactctgaatcaaaactatttcatgaggaccatatgttatgagaaatgcatgatggaaagtgaacagcaaaaagttgccccatatcactgggtgatgtattacaaacataattaaatctgaataatgtgcagtgttatttcagttaatcatttttttttttttgcaatttaagtgaggaaaacatagcccaatttccaaattacataccaaagtccagataagctaaagcagattggtgggagaggagtaaaacaagagctgtacacccttgtttaagcttctgtaaaaggtcttggtgtatttaagatatgttggtaggaaggtgacaaattatagtctctgtaaataaaaggtttaaaacactattcgttttcttttgaatcaacaatgaattcagaccatccccaacttataaacaagcagcaagtcaaaaagatcactgtgtgttcattgtttagaatccagagtataattaaaatttcattattaatagctattaggtttccaagctagcctatgaagacctgtctactccagctgtttctgaaatgtggtatttctactttatcttgatagcattagttacagggagaatggacaacatattccaaattcaatggaatttatttattcattctctactatgttttcccagaatatactgattactacatttccccaaaggatatcccaatttcccaaatgtccccaagctggaagaaatcattttctattctgaacccttggaatactttatttgtactcttataatcaccttctacctaaactacaggtttttgtcaattgagcttaactactccacttatttttatatttttatattactagcttatttttacatttctaacaccctagttccaagccctgaatttggcaagttctcagtacatatatatgtataaaagtggatgcctatgtaaataaaggaatacgatctactagggttgccaaacatattttcccctcagtggcactggaatcatgggatgtaatgggggaaagggaagaatatgataatgataatgacaatgatgagaatgaggatgataatagcaaataatattgtgtgtttaccatgtgacatgctcttgtctaagcactttgaaagtgttgaccaatttaatccttgaaacaactctgtatggtaaatgatatatatgtaatgttacgtgtgtgtgtgtgtgtgtgtgtgtgtgtgtataatatccctattttacagatgggatactgagcacagaggcgtcaaacaattttcccaaactcatacaaatagtaagtataatagatatttctggacaccagaaacatatttgctgtgtacatgtgcataagagggaatgcttccctacattactccagaatacaaagcttctttctgcctttctcatccacataatggaagacacttcttgggtgaaatactccacagttatttcagttctcactggtgagtctgaatataagctctatgagagcagggaccttgtcagtcttattcacaatatccccagcctctagaacaaggctggcacatagtagatgcacaaaaggtgtttgctgaatgaatggatgactgagtctgtgtggggtaatgatagggctaaggatgggactctaaactcaggtttcctctgtgggtttcacagtttactggtcttaagaggagagtttcctaaacttgccttatgataaaaaccaccttcagcatttgttaaaaattacccattcctgtagattctgagtcagtgagctgaagtggagctgataaatctgtttttgttgatactgctgctgctgcggtttttaacacatgcttcaggtggttctaagcttaggaaaccttgcccaaaggataccattctgtctcttgggaaactgcctctatgataggcatttgcaaattcaccaagagtgacagatagtgcctcgggcactgccactgtctcttccaatgcaatttgtacattatgccgaatcataatacaggccttgtacttctgcctcagctgacttgtctgtgggatcctgcagctctcaaccatgcggaggaacgcttccattcacacattttgtccccctaaccctgtcttttctgagggtgcatcaatgtctgatgaatgaatgaatgatggaataaacaccaacatgggcaaacaagcaagtcaggcagttgtgaggagtggaagtgtttcataagcttcagtttttagttgcacgtagtagcatacaaacaatggcaaaaagaatattaacatgtcctgtttccattgctttccttctgacttaaagagcgttcctataacagctaataatctctggacctcaaaatcactatatatcttttttaaaatattttattttccttagttataatggaacagatatggtgaccttagtacccaaaggattattttagtcttacagatatctctctcttccttattctcatttttattcttctttcttcccccagtctgataattatgtccagaaatcagtaaagaacatcaatcttggttgggataaatttaagtagctggaaatcataatatctatgatcctccagagtctagaacacggtttctaaatctcaacgctattgacattttgagccagataattctttgtgatggggagctgtcccgtgcattataaaatattgagcagtgtgtccctggcctctacccagtaggtgctagtagccaacctcccgaatctctagttatgagttatgacaaccaaaaatttctccagatattactaaatgtcccctgggaatcaaaataactcccagttgagaatcactaatctagaatgattttttaaaacaatgtgctttttaacatattagtcgatatttggtatttatgttaaaggatatattaatcaaagttgcttgaacatcaaacgaaaatatggacataatttcttaaagaaattgttggttcaaaagaatcatggctacccctttagatgtgaagttcaagagatatcaggcagaagctgaaatggaatcttgacattgctgagattttacaaaaaaatttgaaaggagggtgagcttgaagactaactaaaatgtctcacttttggcaaaaacatccaaagtgtaatgcactttgccaacagctttgcccttggctttttgtcttgttttttctttttaacttaagggtagttcaagggtagttttaatctgtatgttcctggttcctataatctaaaaatcatccaaatgctgttttataagagtatctcgtaagctttgatgtccaagaagcctgggggccctttttttatgtgcttattttcttttgaaccaggaaattgtgttttgccaagagcaaatggaacttgagcctcaaaagatttgagctctgtttgaaacatagaacccacaaattctctacaggttctcaacttgataaaatacgtgctttcaccttccctcagaccaaacctctgctggttctactttaaatcaccattagcactgtcctatacacctaaagatttccccacaagagaaagggttaggccgtaagtctgaattcctgacacaacactattttcagctggactcatcatcaaaatgctctgcaaggtaagagaagagaagttaaatgagaagacagagaaaaggtgagagattcaactaagtaactaagaaagtcctttgactttccccaggaccaaatccagcaaacaagagattacatcaaagttaaattgtttacatattagatgacctgttcatttttttccttaccattgatttccacagtacaaaaatattatttcagtggcaaggatgtaaaccttattcataacaggatttcaaccacatcctgagaacgaagcatctccttagatagtgtgctctcatttatatcgaagacatgctggttttatttgtcagtgtttgttgagaggtcacaatatcaggaagcaggagatggctcatcaaagcgtctctgcaagcccctactactcatcaattagacagcaccttgtttttaacatcggggcggaaatgcatctcccctgacccattgttagaagcttccttctgtctttaagttttttggaagggacactcaggactcgacttcttttttccaataggtaattgtcactaattaatgctcctgctgcatacaagaatgtggacctgtgaccctgagtaatctgggtctgtatctctggctttggagcaaggacactctaatctcctgactctaaccatgggggcccaggtcacagacacaagacttcccgctgggttcctgagcaggccttactctgcttcaaagccagtgagttcagtggggcagcctgacttcaaggagaatgtggcatctggccagtgaataccttctgaggtgagatgttttctctgaaggtctggagatctttctgcagaaaccaaggtctctagctctattcattccacattcatttactgggtacctgttctgtgccagtctctcacctaggcacggaggataaaatgagtaaaacagagtcccttctgctgacaaggaactagaactaggctcagtcttagccccttgttaaaataccctttaaagtgtaactagataaggtggtcttatgttccatcttttagatctaatgtttttgtttaatggtgcttgttattttctcattaataaaaactgatgagctcacatatgcattaattcatctcatttcaccataagattcttcattcactttccctcccttctcctctcctctcttttcttttctttttcttttttcttttttttttctctctctctctctttctctctctcatctctttcccacacacacaaactaaagcatgggaatttctgatgagcataagactcagaatgactccaggataaaaatatatctctttcccatactcttaacaaaatactagatcactgaggatgcctgtccaaaattcctccctcacttaaacagagctttaggttttccttttcctctagtgaagatctttctccaaaaccgagcctagcaactaccctcatgcatatacaccactggattaatttcaaatcaataaaaatgatataaacaaatgcccaacattaaaaaacaataaggaaactctggacttcaaaatagttaaacaaaaggctggttatttttaaaatagtcttcatattacaaatgtcggattcctttgaataaatctggcccggattcctttttaaacatttatggctgcttgatttccacggttcaagaacctatcactactaaagaaataagctacaaccatgtattatgtaattaaacaggcctaagtgatagaaacaaatctaccaggtaataagcagtgagctctgcacaattctttaaaaaaaaaaaaagacggtctctcactatttcgcccaggctggtctcaaactcctggcctcctcctgcctcagcttcctgggcagctaggataaaaggcatgagcccacacacccagttaagctctgcacacctctttttgggttatactgctagtgcacccgcttcgggaagacagcacagcacagcacatagaaagactcaagctgggctgctaagttcaagtccttctcctccaccaagttcagcaagttatccaatctgtctttgcctccattttcttatctgtaaaatggggggttaataatcatatattagatgagttcacatctctaaagcgtctagaaagtttctagcccatagtaagcactatacaagtgcaaatactaatacatgtttataaaacacataggctcacaaatacatgaccctatacttaaaggaaaagcaggctagagagatgttggaaatagttgttaaattggcttaactttctcaggacaccttgtacccaccacgttcatgtctcctctagccaactataaagttattaacacaagaaccctgtcttattcatcacagtatcacccacaggggctgagacagtgcttacacagaaatggcccttgataaaatatgggctgaatgaatgaacatatgaatttgatactttgagaactaaattaaaagttatttctactagcatttttaacacaagaactattgagattacttatatattagtagtaaaatgtttgctttattcatttgattgcaaaacttataatgaactcagtgaaacttgtccacctttttctacatgttgaaattttcaaaaatccataagattactcctcacacacacacctccaagtatccatagagatggacctacttcataccattatattcataatccaattatttctagaaatcccattgatttcagggaactgaatttgatagccaggaggcattccactggcttcttaaaggacattattggttttcattttgttttgttttgatttcaattgcaactcaaacaatgaatcttccaaagatggttaccctcactctacaaaagtgctaagttaatattctttaaaataaatacaagcatttcttggactagataccatcaactttaattttatttttctcacataaatgttaaccaaaaactaaatgataatttccttctgtcacacagcaattccactgtggtggaacaaagtgttatctcaagtttcacagagcaattgttcaatcattcctgttggtggctcctttccaaatcttcgagaatggcccagccagccagcccttgaaactgggagtgggaggcagagggggagtcgctgtcagtaagagctcagctctgtggcatactggctggttctcccccaggagcatctcctacccatgaggacaatgcccaaagcatgctgcctgcttggggacaattgctgggaaacctctaaacattgaacttgtgcaaaggaggcatggaggcatcaaggaaagcttcatctcaccctattttggtgaattaaattctcacgaagtttggggaagaaaagagggggctcagaaaaagaaatgtattccttagagtttttttggttttggttttggtttttttgtttttttggttggagatagagtcttgctctgttgcccaggctggagtacagtggcacgatcttggttcactgcaacctccgcctcctgggttcaagcgactgtcctgcctcagcctcccaagtagctgggattactggcacctgccaccacacctggctaatttttgtatttttttagtagagatgccatgttggcgaggctagtttcaaactcctgacctcaggtgatgcaccagcctcagcctctcaaagtgctgtgattataggcacgagtcactgcacacggccaatttattccttatagttgaaaagcagtaacaaagatttcggcttcactgaaagaaaacattgttcaaactacatcacctacctcctgctaaaaatcatctacaaagccaccctttagagttgggtcaattaatctttctagatagactgctcaaagaggaagggaaattctgatacatgttttcctaccaacttccacatacagatgaagtaggtttgttgaaccttagatgcatagagctctgagcccatttatgataccaaatctgtttgtaacataaatcaaccaaatgttggaattaaaatgagtatagaatagcttaaagttaataatcaattctattctccaattccttgtaagtcttgaaagtttgtgacacaacagaaactagggttatatctctattttcattgtattttcttcgccctcccacaaaactaggagcaattagtcaaacccagtatatttttttaagatatgggagtggctttgtagaagaatggctttccccctcacaaaaaagtctagacttcttcaattaaaagataaagaaaattaaaagacccctaacagaggtaggaccataggtaattattattttttatgtatttctatatttttataaccttacaataaaagtaaatcatttgcataatgaatatttgtgtgtttgtgaatgttcatgtgcacccagaaggagtcttgacctgacttcaatgtttacataaatcacctgcgaatgttgttaaaactcagattctagttcagtagatctgagatgggcctgagagtctgcatttttaacaggctcccaagttactggtccatagactatactttgagtggcaaagtatactgtatagtgcttgtctgattaaaagttccactaggtgtcttctttcctgccagtccaaatgaagttaagaaacttgaccccaacactttagagcaacaaccaaagcagagttagagaaaagctgacatcacttataaaacttggtctgcggtgcctttggtttttctcttctttgagcaactttggtctataaagacttgtcccctacctcatattggccagaatctagcagctaatgggaggggcgggattataaagggagaaaatttcatactgataattgttttagccaaagaatgggtagcccacctgccatcagagtctataccaaccatttagaaccatgaagagagtttcaggccctgaactcctgagccttgaccagccctgggacacttcttagaacaactgtctcccctctcctgtctcaggtgagtggatctttattcttcataaccttggctcctcaaccctcagctcctttgcactgagctctttccaagctttctcctccttcatagctcccaggcagaccctagacttttcttcctctcctccttaagcttctttgtcttccctttcagtgccatcaaaatgagatcacaacttcagatctatcattgcatctagtcccaatatggggccatggcatatagttaatcccattttagaaacaaagacatttccacatagaaataataagtgacttgtctaagaaggcccaacaaataggtgtcaaggtgagtttgaaccacacacacttcctttcgtttactcccactagcccttcatatctcaaccagattatatttcataatggcccagtagctttttacataatttgtcacttcagttcactttatcaaaaatagaaaaaataggctgggcggtggctcacacctgtaatcccagcactttgggaggctatggtggggtggatcacgaggtcaagagatcaagaccatcctggccaacatggtgaaaccccgtctctactaaaaacacaaaaaattagctggtcatggtggcgcgcgcccgtagtcccagctactcaggagcctgaggcagaagaattgcttgaacccaggagacggaggttgcagtgagccgagatcacaccactgcactccagcctggtgacagagtgagactccatctcaaaaataaatagaaaaaataaaatacagctgataacactgggtcattaaacaacaaccgataaatttcaccatggcttacacccacctaaaaaaatcagaataattctggtttagtaatattaatttgccttttgcttccccactgtatgtgagatatagagcataaatcaattaaatatttgctcagtattagtaataaaaaatacgtgagcatttctcaaagaagatagtaaaatctaacacaaactataaagtaggcattatacctaaaagccaccgtcctctaagaaaaaagacagttgtttcttctgcttagtagcagcattttgttgaagctggtaatctgtcatctaaacatttaaaaaaaaaaaaaagtccactcttttctactaaagagaaacagctataaaaaccaaaccagattgaagctaacagcaactggcctgcaaaatatggtggcattttcacagttaattttgctgccatttgtacctgaatttatcgtggttctgaaaaagtaaattgagaggctaacacagccctcactccgggtgcaccggccgcagcgcatccccagtcgggctggatatttagtgccgctgtgctgagaaggccgaggagagagccaggggagggattactgctcggtgctgcccataaatcaaccgcaacacgtcacacagctccacatcccacaaataaggctgggctggagaggtgtcaccactacacaaaaggaaggagagccctggatgcctttgcccacctggcccttcccctcctgggtgctcatgaagcagggaggcacctcaagattttgctgtcacttttctcccctcactgtctctttcctcccttcacctggggagaagattgggccccaggtatccagtgattttaacaaaggcaggccaccaccgagccttaattccaaagtcccttctcacttgctagttaaccacacagcccttaccttgttgactgggcttcctcctgaactgaagacggtaaatcaagtgtctcctccacccccagggttcagtgactaccaaagaaatatctgaacagccctactctccccttctgcccaagaattttcctcagaatatgaaaatcagggtttttaaaatattatttataaaaacaaacttgccttcctttttaaaactcacaccaccctgtaggaggtgctagtcataaacgtgcagaggctgagaactgttggccccaagggccaaaatgaaaaacagcaccctggtgtccccctgcggaaccagcccttcatgttctaagacagtcatcaacatgattcctgaaaacaatagcggcttcttgtttaaaatggaactgcacctgctagaatatcgtgtcaacaaacaattgctttgtttttcataatagccatccgagccgaagcaatgggacttcctgaagtgcatactggaaggcttattcttagaaggggacagaattctcattttaacacaaggctcagagggccagagtgatggtcatcttccttccttcttttgtactcccctgtgttcatcttatttggttttcaacaggtttatttccattgcaaccctctggcttccaatgcccataatgccatattaggcaaataacattcatttctgcttcctctctgttaatgacgaaggcctttaattgctattccaccatttcaaacagttctcagaagcttcttccctcctctgttgaaagaattgggatgaagcctgatgaaaattctttgccaaatgttcaaccattgctaaatcactctgctctttcattttagtcatctaattatgatgtctgcttccagtttttctattgccctttgatgcttatctgttgaacaaattgtgacacctttaaaaggggttattttggtaaaataaggtgcttggttctgattaaaaagtgttttaagtgattcagccaaggttgtctccatgggctcaggaagtaaccacagccaaaataccctagtgagggcagaatatgagaggccgataatacctattgttaccttcgtcaaggtgcagccaggcaccaggctcatgggagcaagcaaaggtccaggcctctgacaccgcagattctaaagcagccagagctagcgataggtactcaacaaggaactgagatctagtttttttaaagtatctttattttcttttctgtaaaataggagatagaagactaaacactaggattttatgctattttgaaaatgaaaacgtagcatgagaaatattgcctgatataggaaaaagagtgcagggcttaaagtctagattcaaagagctctgcggtcttaagaaagtcactttacctctctgagcttcacatttctaatcaataaagtgatgctgtgaggccagctgctctccaatttcccttgcagcttagaaagcctaagatgtctactctagctaaaaaataaaccaaccttataaagaatttaaaacagataaaaattgtctggtatatcagctagtgttggtgaattttcctgttaatttgaaactttgctctatttcacatttcttaacctcttaattgagaatttacataacttgtcagcgtctcactatcctaatctatagaatgggcatattaatagcacctgcctcattgagttgttgtgaggaccaagtgcactgctacatgtcttcagaacaatgcttggcatgcagaaagtactccataaatgtaagcaactagtagtcataatagtagtagcagttgttgtagaatagctctttgatttgattgtttataaatgttttcaaaaaataaacaagctggccgggcacggtggctcacacctgtaatcccaacactttgggaggccaaggcgggcagattacctgaggtcaggagttcaagaccagcctggccaacatggtgaagccccatctccactaaaaacacaaaaatcagctgggcatggtggtgcatgcctgtaatcccaactactccggaggctgaagcaggagaattgcttgaacccagggggtggagtttgcagtgagctgagttcgtgccactgcactccagcctgggcaatagagtgagactctgtctcaaaaatgaacaaacaaacaaacaaacaagctaaggtaggagttgtttttgtaacctcctcaaactgtcaataaataggtgcccagaacatctgtagtgctagctctgcactgtcactctcagccctcaccattacctgcatcattgacaggagaggtaaggcaaaaccctataaaaagaagaaaaacttccttacgactccaatcaagagacaagacatgagataaaacattggccatcaagtttaaaagatgataatctgtattttaagcactccaaactctctttcttcatactaaatattttgaactgtcacacagatgccaacagaggtttgtttgtttgttttttgagaagaagtttcactcttgttgcccatgctggagtgcagtggtgcgatctcggctcattgcaacctctgcttcctaggttcaagcgattctcctgcctcagcctcccgagtagctgggattacaggcacccgccaccatgcccggctaatttttttgtatttttagtagagacagggtttcaccatgttggccaagctggtcttgaactcctgaactcaggtgatctgcccccctaggcctcccaaagtgctgagattacagggtatgagccactgtgcccagccgccaacagaatcagttcatttttaaacgaaaggagttagactaacatcacttccagccattggactccatgtagctaagaccccacttactttgggtcacacgctgcaaagagaatattttcagagtgagcaagagcagaaggctctgtgcctgatactatttgtggtgcccactcaaatatatctcataaaacatcaacttccacctataggcaaaggttatatcacctattcctgagacacttttgtcagaatgcataagttagctaatatcagtgggagttaatctgattaaataacttctcttttattgtgtgcctggcactgtgttggcaccagagtttcaaagataagataaaactctcatgaaacgaagccatactcttgagaactctcagatagtataatatagtggttaagtgcagaggcgctggggtcagactgcccaggtcatggttgctagaaggaggaaagacaggtaattcattaaaaaaataaaataaattccacctcacaatcttttcccaactcagctctgctttcaggttgagatttactgaaacgaagatcagatgaaaagagtaagtcagaacttctgtaagccagaacacttctttagtatacatctgtgacacagaactaggagagaaatcgcacaaagaagggatcattgagatttgtcaagtcacaattcagattagatgtgaagccccttacctggactctccattatcagatggtacagtcaatgtcatcctaattaactgtttgcattctcaacacctgctcattctacattgaacctacgtaatctgcatataaacccaatgaccattgatgatttgtgcaaactgacaaaaataatactgaaaatgtatcatggttgcagcaatcaaaacctgctcttattcatttattctagttcaatgtgctctcttactaaatgataacacttcacaataatatgattaagtattatcgaagaatgataattttccaaaactacaaaagtttcactgaacaagcaattaatcaattctaggagttctatgatttatataaaaataaaaagccagtaataacccaaattctcatcctataaaaaatatagattaatgtttgaaatatttgttgagtctatggccataccactgtctacagccgtaccatcctgaacatgcccaatctcatctgaaatatttgttgaactatttttatctggaggattgtggtttacattttctggatacacatatatgtaattaggatgatttggggccatttataagttcataaagtttaattctcctctactgaccctacttggcccttaaaaaaaatcatctaggaacaaaaaaacaaaaacaccaatttttagacagataaaatgctgtctcctaaaacacacacacacacatacacacacacacacacacacagagacacactggtcttcttctgatctttcctttagtgtaacaaaaaagttattccttaacatatttcccacctcctttcttcatgccttctcattgctttcccaagctgctcattccaacaatgcctttaactctgatgactcttattaaacacgactacttaattaccatcaatctattatgctatgtacttcaccctccactgacacatctgatcccattatgtgcctgacctttaacggtcatcaaatcaaagtcattctggtcagttcagtctgggcctgacacatgcccaggtcacagagatgaaggcgcaggggcctagcataccacgttaccctgcccttcacttaacacctttgtcaatagaatttcacaactgggaaactgccaggtttctgcctggcttgaataaaatgcccctccttttacagaaagctgaaataaataattacacacatgctgaccagcactggcttttatgtaattggtgcctctctaccagcatgacacactgccttcttggatgtttgtgctgaaaaatctttgcttggaaagtgagaatttattgtgcagccttctagaatatacccagcactccacactggctgaaaatcccctaaagatataagagagatggaaagacaagttgaggatggccacagcaacaccaccaagtgggtggccgccttccactgaaaggccagtccacggaagcattctgggttcacagacttgtgtgctaccctctgatgggaacagctgttcgggctgctctgtctcaaagctgcatgctgaaaaacactcccactcaacctaatgagacagccatttagaaaagaggctcttcctggctagtagggcctggtcattgttattcacccacaggctttccctggtggtgaacatggaactgttttcccagaccaaacatggaccctccctcgaggtagccagacacactgtctggtgtgcacaaacattttgacttctgactggacagctagacctggcagtgtcttccccttgctttactttactaatgcgtgtgtatttttaccagcccctctgggaaaactgccctgctttatagcaacttgtcactgacaaggaatttctcatcaagattgaaatctctggccatccccaaagctcccaacccttctgagtttctgagctcaggacaaggagatttgtccttggaaaaaaaaaaaaaaagaaaggaagaaggaaaaagaaaagaaaactggctttaggaagcagtattgtggttttttcatggctgtgatgaacgaaaaccctcccatagtggcccaaaggcaattacaaacatttggcatgtgacaaattaatagtgagacttatttcttagaagaacaatgatttgcttagatttttttaaatttctagattctctagaaattttccaatggaatgtgtattaccttattctttttctcccacctcctccaaaatataccaatctgagatgatgaactacatcacctatttagctccctcttctcactctcattcctgacaggttaaagctgttttcacaacagttttctctttttgccaggctcttaagcattgcctattagtaatacataccaaatttacttaaaagtcttaacatagggcccataaagcaacacaaccctctaataattgtatcagccatcgggctgaaacaagttcagttccctgaaaaataggaagtttcactgtgtaagaaatagaaacataaataataaatcagaaaaaaagacttcaatcccattatcatctttcatctgaaagactgaaattcacagtctttccacaaatcacttcacttgctatcaaatgtcttccaaaagactctaaatgtcttctaaattgaagttaattgttaaggaaggatacactcaggtgatctatcattaggcccagtaaaaatatttggcaatgtgagcttcgtttccatctgagaatctcaagacaattgaccagcaatcagaaattattcccacattaggagagatgatcggaagtacagatcctacagtaaatacaaacctcccatttcagacccaactcagatttattaccaaaaaaattacccatccaaaaactagcatgttgaaaatacagcataagctattatttggtatgtaacttcttatattacaaccatttaccacttttatttccaaaaactcattttattcaaaagtttccttatgtaagtgatggttctgaaggcacaaaaatatctccaacattttcctgaaatttttattggtttaaaagtgagtaccagaaagaattcagataagcatgacataggactggtgtgtttataacagcagctgtatctgtttgcatttgtggtgtaacttatcctcaccctcctaaacctgaagacccatctctactttgattgacaattgtatattagaggaattctcacggtaatatgtacactatgtaaatttctctatgtctgactggcataaacagactttgcccaattaaagagttaataatcattgagcggagcttgggagcagaaggtaccctgttgctttaagatacatttgccctcaaagtagttaacaggaaatttaattcataaagtcttaggaaatgtcacatctgtaactattcctctctctctctctcactcaacaaaaagagcctcgactgatctcattagaacactgagatgaactagcctgtggtgagtagctcagaggtttggtttgcccagggcctgacctccacaccagccttcctctccctcgtgatagcaacaatttcaagttttaaaggattgagcagcctagcttttttccttacatttaaaacacacctggtttctaggaacagtcttcagtgtttcatcctttacttgattatctcagaaatgttggaggccttgaagatcctggatgtcttttctctgctccttgacaattccatgtgaattttaaggtttcttttctctttttttttttctctttcatcttatccctgcttctctttttcccaaactctcaaataagtggggttttccctttctcagttcttaatatgtctccataaacatcttaccccagtgagtacacacacatgcacaaacacacataacaatgctatatgagggttatgtgaatgttcaatgtgtcactaaaattgctgatgttggtctgtatttgtaataccttaaagaaggatcaatcaattaatcattttaagttctgcttaaaacaaattacagcagtcaaaaaagtgatgcacaaccccttaaacaatgctaatgtattcttgtgaaaggatccaattgacagttttacgagactggagtctggtgaaagcaggtgtacacggcccagcaaaaatggcactatgtcgtgaggtttgaagggagatgcgaaagtcattttatgtggttggcctctgcagagcctcagagaaatgaggcagcagcgaaaagccatctgctgccaagatacaagcacagctattatacttctcgctattcacatgatcatacctgaaactgatatggagtgacattacccagcagcttaattaatgcttttctacactgcatgaaatacacattggcatcagccaagcaaaggaaaaatacttaagtggattcttacattgaattacatatatgttgtactttaatcagagatgaacatgttacttttgaaataaaatctgaaattgttattccttacacaaggaaaaaaatcagcattgcaatctaaatctaaattggaatgtaattttgaatttctagtaataatggattctaagggcagcatttgaagctaaactcttagaagcaaataaaataattgatacttcttttttggtccacaatacctttttattttttgttttctgctctattttagactagcctttgttcttcttaattttaacttgtgagataaactaatggcctttaccataaagcacgtttataaacaaggacaattaggaaatcaggaaagaggacaagaattaatttacagttctgtgagcaagtggataaagctgcgatttacaccgcagatttgagcagtgctgtggtcagatcacaggtgacgtggcgggcctcaagcctgcctgtgcaaacataaagtcagagtcggagaacttgagatgcaccgactattttgcaagagctcaggaagctgctctacataccaaagagcacccccagagagaacttcaaccctttaaccagggtctctaccaagaatattgtcacctgccacctgtgaaacttcgagacagacacctctccatctctgagccaggaattcccacttcttggtgttcagctccaactgctggttttacacctgctgcggggaaagcctcaaatatcttagccacatttggaagtagttcattaaagaggttctaaatgcctatttttaaaaatatttttagaacactcaagagttttatagcacaggagaggcctataaaagaaaagtactttgctaacagtatatggaaggaaatttttcaaattaatttttagtgcacattgttgcttctgagagtttttgtttaatttttatagtgttagaggttacactcatcattttattaaaagattcaattaggtttaacatttatggagcacctttcctttgcaggcttcttggctgaggattcaaggatgaattagaagtgaccctatataggaagctcatggtgtggtgagacacacacagctatctctatacattggcaaggtacacacaagactccaaagcatctcaggggacggaacaattcattccgcagtgcagtgggagttcaggggccaggctgaaaaggcggtccagcaatgtatcaaagaagtgataacaagttctctgggtcttaaaggatgattcagagttctcaagaaggagctcagggggaggagcattccctgtccatgctagagatacagcacttgcaaaggcccagagaccaggaagcacaggtgctcttgcagattagaaagtcagctattgggccctgaggagcagaattcagagtggggcaatttgtggcattcatttttggccactccactttaggataaacatcctacaccaggcaaactttggcttactagagtacctctcaagcaatatgctgaagctaagtagatttctgtggtgtttgacttcccaaagaactcaaagcacttaatcaataaagaacaccatcccatcccatcccctcccctccctcatctcagtgtcttgctgctgcttgaaatttttttttttttttttgaatctctaaagatagccattggaggaggaggaaaagaaggatataaaagttatggtatatttatgatgtttacatataataaatatatgcattttacattttttaaatgtctataaatacaagatttatatatttgccgacatcataataccatgcagacaatgtggttttgtaatagaacacaagtgtgaagttttatgatggacttttttctagcctctgtgtatctgttgtagtatatatacccttgtttacagaaaatgtcacataatgaaatttgaggtccttcataaatgtagagccagagcaaatgcaccccagccccatgtgcccacccccatccagtcctttctaaatgtttactcagttaatactaaatagtaaactaataacaactctactccccagccgagagctcctgctgttggaataggcatattttacttaaataagtgttcttacgtatgagattggaaggctacatgtgtaagggaacgtgcatgtaggtaatgcctttgtggaaagtccacaccccaccccaagatctctcttgctaagattccaagctcactgcctctggaactactgaatggtcagggacaagtggggaggtttgctgtgggtcactctacctccaccactgccacgaaggcccatttcctgggctttgctccctcttcagttcactgcccagagtggagttaacggggacacacttcaccacctcaacaaccactggtggtccatgcagcacaggctgcccagccatccatcaaagcggagcctcctgagaacagcagaatgccagtttcccctgtcaacccacctctcccagcccttctgcggagccctgccaaggactagtcccagcctgctcctccattggccatctgaacaactcccagcatgatgggcagatggaaagagagtggcttgtgacgctctccacacaatgaagaaagaaacatgccttctctcctcaacacacagcagctccctgtcatgaccccctgctgccgttacaaagtcattagcatctactgtgcccctgggggtgagggaaagccaaaccccggaacaatatcatctctgctaaagacacaaaacttttgcttatggcacaggcacagagaattctggataaacaggctcagggttttctggcacccagtgagtggctacctcagaaagtcaccttggtttgacaaggggcccatgagaaggatggagtttggggcatttttctcttaatcctcacaagttatggggagaaagagctactattctggaaattctgcccccaaatttattcttaaaaaaaaaaaaaaaaaaagacagagtcacactcttgttccccaggctgaaatacagtggtatgatcacagctcactacagcctcaaatttctgggctcaagcaatcctctcacctcaacctcctgagcagctaagactacaggtacacaccaccatgtccagcttattttgtatttttatttttatttttgtagagaaggggtctcaccatgttctctaggctggtcttaaatccctggctagtgacatggaactacaaggctgtttgtttgtttttgttgatgttattttgctttcatttttcccatctcaggtagaacagcagcattttgaatctttctctaccatgtactcagcaccaattccatgagctaagttcagggaccctgtctataccactacttggtttgcataaaagtgctgggatcccaaagtgctggaattacaggcgtgagccactctgcccagccccaaattcattctcatgagactttgcccagcctgtaagagggaagcctccatccccatgtagagataacctgatagcaatgctgagggaagcatattgatgtcctcctccatcagctatccagatcaggctgcaggcagctctgcagtggtggagcacaaggagactgcagaaggatccctagccttgggatcagtgccctggcttcaaagcccagccttgcctcttttaaattgctttcatatgtatctgcagctagtgtttcccaaacttcactcatcccagtacttcctttgcaaatatctgtgcatcacctgggcaatagctacttcatgatttccttcaagcactcacttttgtcccctaaattcattctaaaagaacagttcaaatggaaagtcagtatcttttgctataatagagggaatcataaaaagagagaagacaaaacaatattaataaattctagctaaattctgttatctgatgaagcttctgtctttctgttgactagagaaaatagcaaattttttttattttactttattattattatactttaagttttagggtacatgtgcacaatgtgcaggttagttacatatgtatacatgtgccatgctggtgtgctgcacccattaactcgtcatttagcattaggtatatctcctaaagctatccctcccccctccccccaccccacaactgtccccagagtgtgatgttccccttcctgtgtccgtgtgttctcattgttcaattcccacctatgagtgagaatatgcagtgtttggttttttgttcttgcgatagtttaccgagaatgatgattttacatttgcacttattagaaggactaaaagagagcttgaaactaaataactcacttcttggttcaaggctgttgagtactcaggctatgagccacccaaattacccccattctagtctacaccctacagtttaggaaaccccaggctagtgacatggaactacaaggctgagtttgtctgctcttgttgatgttattttgctttcatttttcccatctcaggtagaacagcagcattttgaatctttctctaccatgtactcagcaccaattccatgagctgctaagtttagggactctgtctacaccagcacttggtttgtgtaaaaggcaatatacagatccagcttgaactgagagcaaggaaaggccattagctatcctctgttctcagttattccttcctttcatttattcagaagcattctggagagaaatatatatatatatatattcaaaacacatgttttttcaaaatatgtttcaaaataaagctatgtgaaaaactcagaaatctcatatcacgtgagattcatttaaaaataggtgctaaaaattccaatgacactttccttcatgcaaaatattccattccctcaccagtcatctagcattcaccaatcaggtaatacttcggagaaaaaaaaatagatttatagcttcattttacagacagaatgactcaaactccaaagaggtaaagatagtcacccaatcacagagcatcatcttgaattaaaaaataatctaaacttaccgctctattttacacatgggctaactcacagtccaaagaggtgatgaagatggctgcccaagaccacatacaagaggtgacaatttaaaaattccatactctccaagtttatgcttttgagtcaaacagtagattggccagagtcacttctctcacgtgcaaacaccagaaaaactgctttatctgccaatatcaccattaaatattatgtccctcaaattcttcatgaaattcatggcaacctgtctgagttagcttatcccaaaggtctttatttttgtttggtttgattttccgaggccctatctgaacaaaggttgtaaatcaaaaggaaaaggcttggatggacttcctgaacattttgtaggatgcttgtcctttcaatgttctgtatttcttggccttagcatctccaacactaggttcattgtatcacacaacagtgtcaacaaatgctatgcactaaaggaaaaaagcaatggacctatcatctgctttctatcccatgtaacttcctaatcaatctttccctgtgataacctggggactgagaatacatttaaagcaacactgaatcctgtgaacattgccctttctccaaaggcatttttttttttaatcacaaaacaggaagttccaagccattgaaactcaccagtatatttgcttgaaagtcttctggaacaacaaaacggtacatgcctatccaggcaagcagactattataaaagcagatgttttgctcacttccacttcagagaaacacattgtcaatttagttaacatcctctagtcatttgaacagccttctcaggaagtcagcaatgatataactcaagtacaatatgatccttgtgttcccatttatctcatacttacacatcttagcagaagatagatgtgtgcgtgtgtgtgttaaatgaattagaaggaagaaaaatgctgggctactcactagtctcactaaaacatcaacccacaggagtgggattcaaagaacaaaaggttcttggagggtgtgggcatcactatacatggataacattcttgccaaggatctagcactgcctgtttcccacagccagcacagaataattcacccacacacacactctgtgtcgatcaaccactggaaaggtggtctccaagcatcccagcactcaatgtcagggacctcagccccttgtgcagtgatctggtctcatcgtgccttgggtaaagtggccatgcttcgtcagccagctcaagaagagaggctaaggttgggggtcaagatgaagggaaaactaagaaacagcctaagacaagcaaagggtgaagtgtcagggaggaaacaaagtaagacagaaaaaggaaaaagaaagagagaggtaaacagtagtgaccctggcaaaaaaaaaaaaaaaacaaaaaacaaacaggcgacaggcagcaggggaggagttgttgagaaacggcatggcttgtgtccacaccacagccctgctgttagagaactcatcccacagaatggggccattcagtgtgacagaacaggactgccagccacagtgcagggacagcaggagcaagagcactgagatgctcctgaaccattatcacagaaggagaggaaaactgcattaatgactgaactaactttaggtcttttcaaaacaaatatagtcatcaagctaaatattcccaagtctccagaacacacatgggtatgcacaaacatgtgtgcacaaacacacacacacacacacacacacacacctctttgctggcaacaagataagcaagtattagccagcattattgggacaggttttagccctaatttacagagcttttgagatcatgccccagtaaatttttttaagctaatgtgttcatacaggagcatcacaagtaagtttatccaagtcactgttaaacccacaccctgtcttactaactcagaccatctatttcaatagctaatctctctcacttgaggatgttagccaaggcttgttggtaagggtgaagaggggcaaatagcagagggcagaagggccccagctccagtcaacctttttctctctctcaaacatcaatgccacccaagtagcaccagaatcacaaggcatccagacatcagtgggatttgaacaaagggccaaagttctctttttcaaatgtctgcttggggccttgcaaagccagaatttaaccttatgctactggggtaatgttcatttgggagcacttaaacttaaattactcttaaatcactcctctgtactagacacacccagctcttggcagtgaaccagagtctagatgcaccgcccacaacccactgttcaaacctgaaacttgaaaggcctcaaaatccaaaaagtaaacacggcttcttaatcacttttttaaatcatcagcttcctttatctccagcaccttgtttttctgttgggtcgttccaagcagaagcgagaagtgaaatgctaggccaggatgggtgtatggaggaccacagtgttctgggtgctgcagcagacactacagagggcacagaagaggctcatgcagttcagcccttgtggcgctgccagggcattgtccggggaagggggtcagagcacagcatcaagccaggccgctgctctacctttatgaatggtgtgactttggggaagttactgaacctctgcccctttgttttctcatctataaaacaaggatgatagcaatgtctaactcataggactattgcaaaaattaaatgagttaatatatttaagagcttagaacagtgcctatgagctttattattatcatcatcattattaccattattattccttagtttataagccatggatcacttcccattgcctaccgaggtaaatacacacaccctgatgtagcattccaggttggaactatcttctccaacctacatttttagcctcatctcccattgctatctgccatgcaccatgcacttaaaacaaaggaggtggttctccccatttcctggacatatctcataattctctgactcagctcacatagttttctctgcatttccacatttctatcaaaagtgaatccatctttcaagaccattctcaaatgctgcttgaatttccaaatattcattgaacatgtaaaatcctatagtttctcacaggatgtggctgcatgtactctggctgtcagtgtgcttcttcaaaggtaacaaccaatattgggtgaactacactggatatgctctaaataatctagagtataaagggaaggatcattttcataattaatttatttctttattgcactaatataatgccagatttttagaagccacatgatcacagcttctgttccactagttattcttcacctaaatcttctgtcgagccttcccataattatgcaattaattttttaaacctaaatgcacaattttacatttgtatctactgagagacaccttgcagatcaccaggcagagctccaacttgaaaaagtaatgtggataatactttgttatcttttatattggccatataccccggtgaagtcatctaaaaagcttgagagcattctgtctgcatcatagataccaatgtgaaataatgtaggatgaggacagattattgcagccatccactagtctccccaatttgacagatccaagatctttagatatagttatttcaccagatgtctaactcaccctgccaattttcatcaccttatccacacagacatcaagaaattttataaaacactttcctaaaaccaagttttcactatctattcccttcccctagtaagaatcttttttaagactaaggggttaatttgcatgacaaacatgtttgtctcctagaaactaccactcttttctaatgctccaaaacaatgtctggatatatttttcatgtaatagaaaaaagaaataggagactgatggggaagattcacaattcagtgacaagaagcagcccagaaatctcaaccgcctgggatatttgttctaatgaatctaagggtcagatgaacttctaaatacaatgcagccactccttagcagtttataactgccaagtaggagcgtacacctcctggaacctttagactttcgaaggttcgtaatcctgtcccccagttgaccattatatcaggtgagccatgcagcagactaggaagagttaagatctcttgggttcagtttcctgatattttagagaatcttaagttacaacaattctacattcccgaattgggacatccgtccacgagaaaggcatttccccactcccaccatgatctagagcaaacacgaacaacctctgaataaagcaaagagtcttgtgtgagcaaacctagcctaacactctagactgtgatctgttcatttctaaatagactacaatacctagtctctgaaaatgccaccctatccacctgtaagtcccagtattcgtgcccttgtgtagtctcctcttctcaaatctgggttggccctgggactcgcatttgacctatagaatatagcagaagcaacacagcatgactccaatgttaggtcataaaaagccttgcagcttagaatgctccctccagcaacccagccactgtgctgttagaagccatatgcaaacattgatgtcctcaagaacctcaactgaactctgacagccagtagcaagcagccattcgattgagccactcgaacatccagcttagtggtcttctaatgactgcagccccaggccaacatttgaccacagccacatgagaccgcaaatgagaccacccagatgaactcagtcaacacctagaactacaaaaagtaataataaactgttgtttcaagccattaagtttagggttgatttgttacacagaaatatctggaatcagacccaacttggagactgtggatagcagaatctacttttattctaggcctggaaatgccaaagatgactctggggtcccaggaacttacagccaagttgtcccgggcctcagatatttgaggcctatggatgactcaaaactctgaaataaagatcaaccagaagaactgagctctctggcactgtgtcctaattcggactgttggagaatatcacacaacagtaaaatcttacgtaactgcaaattcactcaagtggaatttcaactaatcacaaattcattatatgtgatctttaagttttcaaagtttgaaataatttatttaacttctagcatcaaaattggattgaaagagctactcttcaaattaaaaatcaatagatgtttataatcatgggctcataaaatattgaaaacaccattcattccatattattccacacacagtgcaaggtaatgagtatgcaactggggtcaaaggagacataacctttgagcaagcaatccagcatgaaaggtaaactctataaagtaaacaaacaaatgattaaaacttcaacatggaatgcagtaataaagaagcaatggtagaggaaattctcatcaaggatgtctctctggagaagaaatatttcatctgacacctgaaggatgaaaaaagttcccaaagtactttatacaagttgcaaggcttgataattaaaattcttatgtagtagataattgtagtgaactgtattttttctccattgacttgcctacacactcagagcactttaaagtcttcccctagcattagtactacatttcaaattttgaatttcataaaaccacctccctcctaactactcaccttcctctcactcttctgcactgtcttgttccccaagacctccccaatgtggacttcatcccagttctgcatgtggcccctttgtgtgaccctcatgaacacattctccaggtttatccccagcagtcctcctacacatgactgacagtattagccccctgctaccatgcaccatgaccctgagaagaagcaccctacctcacatcccacctgacccttagccctcacctgcttttccagagagaggaacttgacgtcttacaagtaatcatgtatttactagtatataattttctgaaattattttcaagtaatacatggacttttgatcttattggtcagtctaataggcaatggagggctcacacatctgcttcagcacaaatcaaggcctgcctgacattaagacctggcttcctggtgtggttgacatggttagttgcctccccaatattcactccatttatctcccttttgtgctgcgtgggtgggattaacatccgtggcagagtcagttggctgatcagcaaagattcatgccgccttccacaggttggagtggatgctggaaagcagatgcccactcaaggcatcttctcacactttacacttttcttgacctaggaggggtcacatgattagttctcaccagtggaatttgaggggatgtgatgtgtgtcatttctgagctaaagtagttgagaagtagatgtatcttctccaaggtctctttctctgtttgcagcaattttggagtgccacgttgaagatggaagagtgctaagatactgaataagctcctggaggtgaaccaatcattaggattagcaacacccatatcagtctacgagataactaaaaaataaatgtttacttaataaatgtattaatccagagagaagttgggatttacctgttatagcacctagctctcccatattaatatggcattattccaagctccagcgatggattcagacttggttcagagatgggcatgtatcccacgtctgagccaatcagtgcatagtgttcctctagccacagaagtgtcttcaaaagctgacatattgcctaactcagtccaattagaagaaagattatgatttcttttcaaagttttggagaaaataagctttgtctttcctactgaatatgaataacaaagtatatagtgaagcattttgtgatagtctgaagccaacacacaagaaagaagggccaagagaaacattaagaataatagaaccagagtcttgatcaaactgtgcctgggcatgtaatctattagatttttctgtttcctaagctaatacattcccttaatttttaagccagtttaaatttggttttctttattaataactaatatcttccaagtatatacttcattatacatgaaactcttgtaatcagtatagggaaaaggaataaattaaaaccaattgcaatttaaacataattcacagttcacaaaaccccaagtattaagataggatatataattggcacatcaataaaacattaatcaaaattcataagtatctatacctatgacatgcactatatcagtcagaataggttaagttatgcttccataataactaactccaaaatctcagtgagttatgaaaagtttatttcttgctaatgctatgctatgtgtcccattctgggccacctgtgcctcatcttcatcattcctctgggccttagactgctaaaataagcctctatctggaacaggaaaaagacacaacacagtgaaccacatggtgaatcttaaaaacttctgttgcgtgtattggtcagagcaaacctggagtcacagagataattctttataagagacgtagtgaatatttgatttgagcaatattaagatattttattaaaatttttaattcaaaaaaaattaatattttatatgaacagtagatttctaaagttgataaatcctaaattacctactgaaagaataattaagaccctaaagaataatcaggcccaaccttaccatttgtcagcccacagatcagaatgtgaaaataagttcatccaaggttgaaagaagttgggctgtcaataaaaaagtgttgaaaagtcttctccaaaacattgtctgtcaccattctaaaattttaatgactactactaaggtgctggtcagaagagagaaacactagaaaaaatattgacactttaatggaatttgaggagaaacctacttgtaggagtctgtccatctgtgctattctaatattttattttactactaaggcttctcttctgtaaggggtggtggtaacagtagcagctttacagaggtcatagaactgaagaaaaggattttactgagaatttcaaagtgctaagcacagtacaaatatgacgtcatggaaacatcaccacacccttatgaagtcggtggtctcatctccgtgttatagaggtgatgtcaatgtccaaggtctcagagctacgaagtagtagacacagatttaaacatgtgctctgcccctaaatcctatgcctcccataaatcaaggtttgccagaaagagagacaggctctgaactcaacaaaattatgaggaggtgattccaaggttatgtcaccctcccttgtccaatcagtgcatgcctttgtgaagaaatcagatattctgggggataagggtcaatgcattctcccacagagggcatgaagcctttggccacccacctgaagccccaccagtgacactctagatctccataggcaggaagaggcagcactgggagggcagaagtcttttcacattgccacctgtcatgctaagggccaccctaagattggagttcaggcaaacaggatggtggcagaaaatggaaagaaatctgtttggtgatcaagaaagcttcatttggtgaaaaacccagaacagagcaagattaaggaatcaggaggccaggtgctgaggtataaaggaatagactggaggcacagcagtgagaagtaggaaagcacttggagttacctcaggacaggatcggctgaagaaaaattagtcagtatactgactgttctctatttgcatagccacacatctgggtaggtcagcgcttctgtgactttaaccccactgagccaactccttactgataagcctgcaccctctgatggctctggcttctgtgcaatggagagatttgacgctattcattgagggtttcactacgtatctgtggccagttttttattttccttgcaaattgttatttgtaatatatctataacctgcaagtatggggcattatcataagtgttctattcaaagaagctagaggaccacgtgggctaattcaataccaatataaatgccattttttagttaacaaagcattctccaatgtattagctcatttgaacctcacgctaattctgtgaagtaaatattctcattcccgctttacagatgagaaaactgaggttggggtctattaactatctgtccaaagtctcaaagccagtggcagagatagaatttgaatttgggtcttctgacaatatgatattgccctaaggaaaggaattcataaatcagagagaacaattgtgggcactggcaaagaggaatgcattggaatggagaagaaggtccatatgacagctgtaagattatttcaaggagaaatgaagacaaattggaattaagctctcttttaatgatacatttaccagtgatctgtcattgagaaagaactaatacatagagtatcaattttcagtaaatataaatggcaaataaggcatttaatgaattgcaaatgacagtgtttctaagagtagttatcaatcactagtaaaggccttcccatttattaatcatatatttcatttcagcaaagaatctaacaaaatggcataaagagaatacagagctgtgcaacacttgcagggaattaaaaagagaaagaatacagagatggtgcagatggtgactggggaaggtaggcatgaaaaacaaaacttctgctttatccatttcaaatgtgaagggaagacaagagagaaggaaaatatttagaaatgggattttaaaatagtcgggtaactgataaaacattaagaaaactacaaattgtgagccgagatcgcgccactgccctccagcccgggcaacagagcgagactccatctcaaaaaaaaaaaaaaaagaaaagaaaactgcaaattcatccactgtagggtaggttcttaagccaactaacaacaaaaaaaaaaagtgaaaaggaaagaatcttggccaaaagtaaagagcagttcagagaagataaaagagcaaaaatctgactgctcggagagtcaccatggttatggagagggctccagtacactgagttgccaaattatctcggagattgagcttatcaattcacacagcttcaggtatttagcctggccagagttttattcaaaacaaaggttaattaaaaaaaaaaaatagaaagtactctcatgctcccttcccctacttcatcctgccaacctatcaaaaaaaaaaaatcagtaagtctccttggccaactgaatgattttaatatcattataaagtcttaatagtttgttctggatgtgctagtaaagccaccatgcaaaggatttaaggcagcgtgaaattatcaggagaatgaaaacccagtagcatctcccaaagctattatagaaggcatggttcaagaaaggaatatccccaatcacaaaagaggaaaagagagtcagggctgcaaaggagagcaaaaaatatctacaaatggttactgcaactggtcaattaaatttagcctttcttctagtgtttaaattaccaaatcattttacacatttatacaagggcagaaatgtttgcaacaaactctgaagcaaaccagattgtcatttttttctcagggagcctaataattcaactcctcattcaaataacattgcatatttatgaggctggagtctaattaaattacatcagtcatcaatctgattttgctaaattttcttttcacataactattaatggaaatatgtgaacccccaaatatgagcctttaaatattgagttattagcactgtgttttctaaagaaaccctcttacaggtaccccaaatgtgctgcaccttgcacatcccctttctgctgcacatctgtttttcttccacattctttcttctgccatcccgtatcccaccctaccactcccagaatccaaatggcagaaaagtgtgaatgagcacaaaccaatcttgttattactaccatttccttctgcttactctcaaaataagtttcataagagagaattaggtcacttataaaattacaaaaagagtccttcatccaaaatcattcaccaagtggaagcttcaaaaacattaactgagggcatcatgacaactctggcctgaccttgggccttcatctccactgggttcagaatattgggtctaacttttagaatacagcttcctattttatctcaatggtatgtaaacactctatagcagaaactattttatttaacacagtgaaaatgaaatgaataatttctgtgtagtgaaaaagatgtctctcaactagagatactcaactctcataaaacaagtcacaaaactgcctctgatagcaacaaatgtatgcagtctagcagctaagaaataggtaagccagcattctcttaccagtttcaccccctcgtacgcattgcctagaaaaacttaccctcatcttccttatttcaagcctcaactgtagaatagaatcattctattttctttagtttatcatatagtatgctacaaaactcctcttgcaccataacttataatcctcttaaaatacatagattatctcaaatagttatgattctgaagccccactcctgaggctagaaaattctactcttggttcagttcctcgcattttattttatttatttgtttatttatttatttatttatttatttatttatttattgagacagggtctcactctgtcgcccaggctggagggcagtggtacaatcttggctcactgcaacctccggctcctggattcaagcgattctctttcctcagcctcctgagtagctggaattacaggcacatgacaccacgcctggctaatttttgtatttttagtagagacagagttttgccatgttggccaggctggtctcaaactcctgaccccaggtgatccacctgcctctccctcccaaagtgctgggattataggggtgagccaccacacccggcccctaccattttatattttatattcatcttacactggcagtataattttaaaactcaaaattctcataaaaacctggctttaatctctcttttcaacaattgaaccatcatattcctttacagttggttcaaaggaaattctaaaaattataaaactcaagtgatcattttgggggaacaaaacaaaggggcaattagattaaacagcattgaaataaactgcaaaatccaaatgaaatctctcagaggtttgtgcaaaattattaatagttttgaaacaagcagttaaaactaaactgaaggagtgtgggcccttcaggtgtccaaagttatacacctgcacacattttataaatacacactcatgcctctttactgacttagtcctctctttgagtaaagccattcttcttcggcataagtacacacaaatgactgtgtttctcaacaggggctgtttctgtgtccgtcccactgatctcaactaaacctccggaaccattaggaacacagaccaaatgtacactcaggtgcaactgaacatacctaggctgtccaacaacaacaaatgagattatttaatgaattttcatgtatatggaagtctgtgactgatagcattgattaaaaccaaccaagcataagggctactggcgttcaacatctaaacttcctaaaatatagcccgatcccaccctaaaacctaatatcctgctttttaacatttctgagtagacagatgtattttttttttctggtttccctgcacaccttctgtagaattcccattgcttcctttgcatgggaaggttggcagaaacatttatgtctggaattctagaaaaccaaaagacaaaagtggctagcaatagtaaagtcctccctcataaaacagctgctgattctggggtttttttctattgtttaccttgttgtttaatctgaagaaacattattgtctccttagaaatggccaccagatcaaaatggtcaaaaagatatcagagcttctggattctccacaaacatccactctctttgatgaagtttccccaccaatggtctttcacaattgaaaatctctcatctattgcggctacaaaggccagaaatcataggcagaaagcaagatcattatctagtttaaagacaaccctatgcctgtaaaaactgaaaggaagccctatatgaaaatatatataatgctggaagtagcccccaattgtagcatttggaaatagccctgctatctccctattgtttaatcaaaatgacctcctgcttcccagtttctcatgtctgggactcacattgctctccactacctgagtcccatccccaaagactctgatttaattggattggggttagtatttttaagcattccaagtgattctatgcagccatatttgaaagtcactgtctcttctcttaacttgtccactgctctttccctaaaagtaaaaaaagaatgatggcttccagcttcatccatgtccctacaaaggacatgaactcatccttttttatggctgcatagtattccatggtgtatatgtaccacattttcttaatccagtctatcactgatggacatttgggttggttccaagtctttgctattgtgaatagtgccgcaataaacatacgtgtgcatgtgccaaacaccgcatgttctcactcataggtgtgaattgaacaatgagaacacttggacacaggaaggggaacatcacacaccggggcctgtcatggggtggggggagggggagggggagggatagcattaggagacatacctaatgtaaatgacgagttaaagggtgcagcacaccaacatggccgatgtatacatatgtaacaaaactgcacgttgtgcacaggtaccctagaacttaaagtataataaataaataaataataaaaaattaaaaaagaactagatctgagagctcattaggctttccttatctaaattctacaggttattcaattaagtagctagtgaaatactttgttgcaggcccaagtcatttggatattaaaacaaaattgaggataagtgaacgagacttggtctcaagtattgtacaaaaaaaaaaaattagaaagttgtagctagctttccttgccctaaaaatatgctggtgagcttgggcatatttactgtcacaatacattgtttaggaaatgaaaatctgaatctagcaccatctattcactggtaaatgataaggtataattagcttgtgatgtcaggcaatgaagtaatgacgtatccctaagtcattcattcaaccaagacatttggatctccctaaacaaaactaaaatcataacgtaatagaaaatcacaatgcagataacttgaggaagaaaatgaaagatgaagggatgaccagcccctgtcataaaaagaagctttctcattttaaattgcagcaaaattcctctttactaagagttgtatgaaatcatttctttaagttaaagtgtcttttttccaaaatcttattacgttttatgagctttggaatgcccaggcaatgtagtgttctacttttatttctggatttaaaaaaataaggcagtggagcattcattcagattaagttcttcgactttattgtaaagcagatcaaggtttggatcctggctctgtacttaaagctgagaggcctggagcaaagaacaaacatgtctccagagcgctcatctctaagctaagacaataatatcatccacctcatagagatgtgaggattaactgcagtgacgcatgaacactcaacaaccttgactggcgttattacttattgttgctgttataaattatctccattttacagatgatgacattcaggcacagagaagtaaatagctggccaatgcccacacagctaggtagtgatagaaccaagccatctaatttaaaatatgctttgaaaaatgttaactagagtaatgccctcatggaacaacctgtaaacatccacaccaaaaaaaaatatgcatctggaacaaatattgtgctctaagggattaaaactgaaaaacctaaataatgtggttccagagtctacattcttaataccctcttagcatttttaatattctataatttctagagtttctaataagaaattctgtgtgtgttaagtttacacagctttttgcagctgataaaagcttatacatatgtcatcttatgttagcattgctggtctggaagaagccaaacagaggtagttattgttcctctcttacgcttgaggacactgaggctcagagggttaatgccctgcagaaggataccatactgatgagtagcaaacttgagactcaaacccctacatcctgacgtcccagccagcattatccgccagaaaacatgtttacggtacccaaaatatactgaagttttgagatgatcacgcctaagaaaaaaaacaagtccctatcttcaaggcagggagggctcaaaacaccacagagagcattttcctcttaggaaagttattagtaattaacaagcttcataatgacatgttatgacatggttaggtaaattactccagaagcagtagaaggaaacaaatgtcacattctacaagtcctggccaatgccaaggattcacttggaaggttaactaagatggagctcattatgctgtattaggtatcagagtattttgtcttcttgaagataaaaccttggtgactgatattaccataacttgagggcaggaagagagatctgatatacagaccatgaggcactttgaaaaccctagacatataatgctctttaccttgacatttcccatcctctaatgatccatctacccagtatttttaggtcaaaaaaatatatatgatacaatgctgcttcatgggtcaaaccacggtctctgctggtattttaatactgcatcattatcaacagaatacgtaaatcactcgcatcttaagcatttaggcaaatggggaattttgcttagaatttcagactgtgcccaaaagtaaagatgttcaatgcactgatttctgtgccaagcctagtggctggaacattggcttggatgcatacacatagctcagcaagatggttggcaaagacagttggaagagaaggcagcgctttttattcttatttctgtttcatgaacaagaaaatcacatgccagcctgaaagacaagccacttctgtgagtttatgtcaatttgggggtagcactatcttctactggataaaaattgaacctagcagaaagacacacctttggaaaccatggagacttcagtttgggcattttaatcagatctttgctctcagacagtggtgctcttgtaagtggcaagaagctggaggaatgagatcctttaaagagaacttgttcttgaactgtgatgggaaagtttgctctaactgcacaaaggataaaatacgcaaaaactgtgagcatggaaggagtaatttgcccatctgcagacccaaggcttgtatttctataaagtgtttatgggctatgtaaatacatcctacatcttactcagttattgcaatcagcatttccctaacaacagacaaatgtgataggcagactttccaggaaaacatcaggctgacacagtggctcactcctgtaatcccagcactttgggaggctgaggcttgcagatcatttgagcgcacaagttcgagaccagcctgggcaccatggtgaaaccctgtctcagctactccagaggctgaggcaagagaatcgcttgaacccaggaggcggaggttgcagtgagccaagatcacgccattgcactccagcctgggcggcaagagcgaaactccatctcaaaaaaaaaaaaaaaaaaaataggaaaacaaaatatctggagaagagacaggcttaggattcagtattccaagctcacaaaaccagtttgtagtcatggatatctttgtccctgttaataaatcattttcaggggtatatgtatgtctgtcaaatgtcggtgttcaatattttcaggaaattgagtgtttataggatttaattcatcatgccttacatatgctaggtacttgataactattcattaattcaatttgattgatctaacttaaaatatactttgaaaaatgttaatagagtaatgccctcatggaacaaccagtaaacatccacaccaaaaaagtacgcatttgaaacaaatattgtgctctaaggaattaaaattgcaaagtaaattaatcccttaaagatttatatgaataattttaattccttgaatggtaccttttcaaatccaatctaaaatgtccaatatgtttgcaatctgatataatccaatgagttttaataagcaaaatagttcttgccagtagaaccaaaacccagttattccatttttgtaaccttctgtgtaaaggaatgggctgaactaattttttctgaattttttatatttaatcaacaacatcattgccaaagaaaaccacttttcagaagtctctctatcctggtttataacttataatcaaaaactggaattttgcatctgatgggctttagtgtgtaacactatactgtcatattttttatgctatagttaaaagtaaaagatagtttccattataaaaattttcccatagtctgattacccagtgaaaaacatttttctataaaaatggtcttcataattcataagctagaaattattgtgggtaattttttaaagaacatcaaaaaagttttggtgggtctagtagcatcagttggctttaggtacatgtacaggataaggcagtatgataataatgtcccacacaaacaaggaaatcacttaacaacaacaaaaaagccttgaggcctgaaactctgacaacttacttatccttacccagtttgggctacatggattgatttcagctacagcctgttccaagcagcaggaagaaatagaaatggggcataatataagacctggaataatcctgtaagcttgaaatagcacagatatatcacagtggattttagaaagatataccttagctctggttttagacccttgatcctccagaagccaaagatgcttggaaatctgatctgccctgacagtgaagcaaccctctatgaccttcccaaaaccctgctgtgaccgtgtctcagaggccagcacacttcaccctgaactgtgagcttcctttaattgcagactttactttcatattcctttgggtcctggtttggggaacttctctgtctgttttgttctgaaaactggacactacccaaatgtcatccacagggaattggttcaatgaaatgtgttagatctaaacaatagaggatcttctgcctttaaaaagaatggtttagattgatacatacagacaaaaatccaaggtatattaagtttaaaaaaagaaaaagccctttatttctttctcttgtctgattgctctgactaggacttccagtactgtgttgaagaggagtggtgagagtgggcatcattgtcttgttccagtttgcagacggaatgctttcaacttttccccactcagtgttatgttggccatgggtttgtcacaataaaataatgcttttagtacattgaggtatgtcccttaaatgccaattttgctgaaagttttaatcctaaagggatgctggattttgtcaaatgccttttctgcatctattgagatgatcatgtgatttttgtttttaattctgtttatgtagtgtatcatatttattgacttgtgtatattaaaccatccctgcaagtgatatgaaacccacttgatcatggtggattatctttttgataagttgttgaatttggttagctactatgttgttaaggattttagcatctatgttcatcaggatattggtctgtagttttcttttttggttacggcatttgcagcgacctggatgagattggagactattattctaagtgaagtaactcaggaatggaaaaccaaacattgatgttctcgctgatatatgggagctaagctatggggatgcaaaggcataagaatgatacaatggacttggggggaagggtggagagaggatgagggataagactacaaatatggtgcggtgtatactgctcagatgatgggtgcaccaaaatctcacaaatcaccactaaaaaatttactcatgtaaccaaatatcactagtaccccagtaacctacgaagaagaaaaaaaagaaaaggcaatttgctgtaaaaagttgtaaatctatatgtatgtatgtgctaatatatgcatgggggaaaaaatctgctggaagctacactaaaggatgaatggtggtcatctgcaggcaatttatgacaaaaaagaaagaaaataactttcatttttattttatacattcttttcatttaaaaattattgtgtataaattttgtaacaagaaaaatattgtgtataagacaatgaaaaaagattgataaaaactttaagatgttttataataaacatgctaaggtgaatcaagtctgaaaaaatggttgaacccccattcaaccatttagaaatttagaaatccatgagctgctaaaattgtatgaaaatgtttcttgcatgtgtattttctggaaagaagctccatactttctatgagattctcacaggagtctgggacccaaaagaaggtcatgaactatgaccctagccaaaactaagatagctattccatccctccattcgtttttattatcattttatcatgaaacattttattactaatttcatagttcccaccaaaggtaaagtctatgctaagcataaaagctgtgggtcttagtcttaccctcacttagaggagttcccattgacttaggagcagtcctaagtgcacaagaaaccatatatggctgttctcggtaaaagaaaactcctaacaggcactaaaagcctgtaatcattcaggacttgaggatagttgtccaagacacagacagtcctattttctctatagagatggttgatttgtgaaatgacagatgggggttagaggagtggggaggggcagagaagaagaagtcatgtttgcacttgaattaagggaacagagttgagtgagttgggttaatttaatcagtaaaacaagattcaatacattatctatcaaccttaaattgtttgaaagaaatctttaatcataaaagtgcatttaaatatacagcaaaatgcttgacaccatgctctatattaatagagcataaatattaggcagcaaaactgcctacattggtgttaggatttaggtaaaaacttggcttctgatgacttgtaaactgaatattcccaaatccctaggaattacatgagtccacagaatgttttaccatttctaccttgactcctttgacattctccagaatcaggtctagtacagagtttaagatcaataacaatttgtgatttaagtgaggggtcatgggcaatacctgcactggcaaaatgagggacattattggtgaaaattaggaataatactccactttccaggtggtttatcactgtcaaaataggtcaattgtggatttagtatgcacttgaaatgtcagatatcccagaattctggtgccgacattacttaactgcacaggttttacagccaaagaaattgaaggggttcacataatccaccaaagcccattgctaaccaccatcacctaatcatattgatatctgccatatgcaaagcatagtattaggccctatacaaaacagaaatgggctctccaggagttttacagtttacctagaaaaataagatatataccatgaagacaagcaatttataataaaatgccaaaatgatgataaagacaattccatactattggaatgaaataacatagaagtcatatctccaggagagatcatgaagaagcaggagttcaaatgaaatcttagaggagttagattttgacagtcagtgtacagtatgggtagatttacaaactatggcaacattatggccaaaatttggatggtagaaacacaagagtaggctgataagagactgagaggtacagaatgagtaaacaaggtaggctgaatggaccagtcttgaataagacaagcctgaaaagtcaataaaataatgtattgaactcttattctatttaaggcactctaaatgcattagtttgatcaaatcctcacatgaggtaagtacctctagtccacaagtaaggaaactgaggcacaaaaaggttacatggcttgccttcatttcaaccagctagtaaatggtggagccaggattcaaacccaggcaaatctcactcccgacctgtactcaggagtcaccacattcttctggcacaaaagtagagcccctcaacagccaagctaaggaatttgagattcagcatcaggtataaagattgagaatgaggtgataactcattgataatgcttatatgcatggttcatcactactcagaatcttcctctaaaagaattgcattatccgatgatattcccaacaatattcactgatagtgatatgtattcactgacaagtcccatgactacagtattgagttagatattataaagtgctcagtcaaatctttatcaggagagtccattgtgttgacattccatcaccacaatttttaatcctaaagacttaattttacctgttattcacctaacacttctgctagaaatacaactcatgataataaacagagcaaagtatgtttattttcacatgttacccgaacatatatgaccttcctacatggaaagccactctgctcaaataagacgttcatcccttaaaaacttatttctccatcctaggttcaggtcttaaaaatcagttgggttcctcagttacagatgtacaggacattacatctggactctcctaggagggcaggggtgaactcttcctctgaatatccacagtagccaaatgactccttctcccactgtggaaaaccacagatgactgtctcctaatgatttactgcccaacccccagcccacaaatcaaagaattgggtttagtgagaaataagaaagaatggtggccagtggatacaagaaggggagggaatgcttcagtttattttcttaagccaattaatgatgaaacggcatggagggaaagaaagacacaacatagttgtaaaagactatttttccagataaatggccagatatcagattctgtaataagtacttccacctatcaaaacacacacacacacacacacacacacacatattaacttgaggtggggaagaagatatagatcttaaaaacacaaggtaatattcaaaaaccattctggatatcaccataaaatgaaactttgaagcacccttggaaatcaatgaatctggacattgcaaaccctacaaactatatattgcaggcagaggtgtttggttgggcctgcagaattttttaaaattgaatcaacatttcataaagtagagaaaacttacataaaaacccagatttgtggcttctcttaaaaagtggaagacctggcggccctgaacccccttgcccaaatggtaacagtgagcaggagctgagaagaagctgccacctttagaggagtcttgaactgccagtttcccaccatccccgccactccctcttgttctgaaatacaaaggctgggtgtcaaaaaattaaataaaaataggagagagcttaaggcttatacccaccttgcttcactcatttatggtacctgcaaatttacaggctctgctctagtctaatccattcatttaaagaggagcaacccagctgcagtagtaaagtgacttacaaactcaatccactaaaagtcaaattttcattcaggagggattattgcctaatgataactagagagtatgcaaaactaaattagggctgtgtggctatacaatgccaaaatctgtggggaaaagttgaaatctcaatcattttatttacacatccccctcaccccgactccaaataaagggcaaaggaagatgctcaagttttcagaacaaatttactgcctagtttggcttggtatggacagttttaatgtgcccaaattttagatatgacttcccttcattctgagggcataatttattgagaagacatacaaaatgcttaccgtagacatgtaaatacttttaaaaaggaaactggataaaaacattaaacaggaggggaaaaaaaaggatgtttcttcttcagaaaatttaactgataaattataaggaaactgaaacccactaagatttattgagcatgtgccttaggtactttgcacacattataccaattaactctcacagcagcccaaggagggtagtattattactcccacttcacaagtaaagatgctaggcctcagaggcattcaataacttgaagaggacctgacttttcaatcagggatcatgcccagattcaaacactgatgtgcacgtttgtaatgcttgtgagagtagggaacatggtttgcccgtgcacagggcctagcacattgatatttgttgtgtaagcctgcccatcgccaaagcacaaaaactgccatgtacaagcactttcattcataaatgtcatcatttgaacaaccttgacatatacaactaattcatttaggcaggttcttgaacaaggtttaggaaatgttggttctttatgttgtgtagttaatgacccctacacacatgtttactaacataataaaatctcttttctaaataaatttctcctttagaattgttataaaagtcagtagtcaagaatttggctgaatatacaagccaaaagcacgtttgctaatgaataagaataataactaaaatcaaaataagaattaattcaagaatgagtgcttttgaagagtcaggaatttgattaaaaattcagttccctttttttccataatgaaacagttctttaaccacaaaacagcttttataataatgccgaagagtatggttccaagcaaaacactcccccattttaatcatggctattatttttgaaaatgaaaatgactgaggtcattgtaatctattttagggtttgcatgggttgatggtatttttgtcttggctttgagttctccacattacccactaaatgttatgggctttaccgtgtgccctttcaaatcccattctttctaataacattgtattttatacacataaattagagtaaattccactttctttcctaacaactccagatgtggtccacactttcaaaaggactagaacttgccttaaaaaaaattcagtatgtacttcttagaacaactatgtttctatatagataaaaatgctgtatggatgtttaaatgctgaataattagtaaaaccataggacttgtggttttttcaccaaagtgaaatatgaagataatatctatatatttactccttccaacttacaaggacatacacagataaaaaatgcctagaaacaaaaccatctgggcagagttctagacctactgataccaatagggaagggggatctgtattcagacaaccatttagaacacatcagtgaggctctctgtcccctgtagacccagtagacaaaattaacaaatatctaaatacactaaagttacacagtcaaggctccctttagacgcagttaatatttcacttactttctgaacttagttggggtttttattaaaattcgctatcacgatccctctaggtaacccctacacagccacacgtgagagaatggcttcacaatacatacaaattgtggagatctggctattaaaatgccttgagatctgtttgtttatttttttaaaatcaacttgcaaggccaatgtaataagatgctgtagcttttatgaaagaggtgaaataattttaaacacagacacacaatgagtttatttatttagaaacttgttaaatagagtctgggaattcaaatattcaatgttgacattgtacagaattggcaagaagccagaacccagtctccagagggacccattggacaaggaattcaggactttctctcctcccacttgagctaaataggtagaagccattagttatacccacagcaatatctgaaccacactcaaataagctgccccagccagggcacttcaaaggaggctaagtgtgtttagctttttagtgctgaactagagcaatatgtcacacttttgaaagagtcttgtaaacagtttcttccctatgtagagacatctctgaagtttcttgtatggcttgtagtaagcaaaggtaattaacaaggattatacttttttcatttcctggaggggctggggaggataataccaatctgtgtgcaaactaaggatctggaagaactacactatttctcccttcctgtctccctctctggttttctgatcgatttgtctgtctcctctttatcctcttccttacacttgttctcactatacagccaatttccttgaaaattccctggtaaactctgaaggccagaagagtgggaagggggaaatctaattttagaaagaagaccgtggctagtggagtggggaagtcgggagggaactaatgatttatcctgcgccgtccaggagaaaagaaaagcagaccccacagaccgttttagaaaatgcctagacagcggcttccagcggaagaagggttaaccgtcactccaaaaaaatgtacctggcatcatcagagtgtaacttttccctcccaccccatctcttccccaaactcactctcccttgccctatgaggctaggaaggagcctgtcccaacagggagagtgaatgagtgagtgtgtgcctgccctccgcgcaagagtgctccttgtcttcctgaagccaagacgtgtgtgggtgtgcacacgcatgtgtgggtgtgagtttacactgtcaatgtaaacccagctccgagggaagcagcgcgccaggcacgcagcccctctgagactagagagggaaagaagagttctggccaaaccttggagccctgagctgagcagcctgaggagcgaggtgtagggggccccctgagtgagaaactgcctcccacctcactggggcttccccagtcccacccccacgtccatcttgggccacttcctcagcaccagacggttttgagatgaagcgtgggagggctcagctcttgggaacagggctctgggtgccttgggaacagggaaaaagccggtgaccaggagatgacaagtcaaggttctccatctcaccgcccgcttccagcggaggcaacgcgcaggggggtgccgggagagagggggccgagccgggcgtgccgggggcaactccgctctcttgtccttctagcccggggaggagggcgtccccccttcctgccccaggtcacaactgcagcctcggataacctggccccaacttacaaaaataaaataaactcccaaacagtaacatgcttaaagagaaattgcttacgactcctcaccttcaactccaaaaaaaaaaaaaaaaaaagaaagagaaagaaagaaagaaaccaaaattcgtggaatgacatgttaatttctagtcctacatgttgaatgtctgtccctgcaggaagccggccccagggcccaggggaggccttggctcagaaagcctgggagctgggctagccggcaaaagtcacactcactcacattcacacacacactcacatgcactctatagccaagacctgcaactctgcagtccctacaaataaaaaaagaagccttgctttttagcctttctgcctctacagctaatgaaccgttcccttccacagtgctggagatgagggaagaatgaaaagcgtaattaaccttcccctaaacacagatttttttttttttttttttttttttttttttttgcaaaacacatcaaaatactgcaagaagactgtgctccaagtgccaaatgcaataaagaagccctaagcccgggtaatggtcaagtaatagcaaataaaccgccttcctagaaggggcctcggcctccgttgggagaaggattttcctcctcagaagcaatctgaaataaacaaataaaagtattttttaaaacaaagctctgttttcatctgagtttcttaaggatgaaggaaaacccaagtaggtgggcatacagagagtaaatgcctgaatctgggtgttgtgtttgttgttgtgggggggttgttttgttgtgtttatctcagttactgggctgacaaggtgagtagtttaaggacgggagaaagggtcggcatctacctttcctacttcagagcctttttttaaacagagagcaagtgtaggagtaacaagtgccccccttgccgcggtcttgctaatcgcatcgccttttgagactttacgagacttctggggggccggtagctaagggagttactggatgcaactcgttctctgctgtgactgaattcccgcgcgttgtcactttggggaagtaaggtaagggtggcttcggtatttcaggctttagacatgctgcgcagacccaacctgcacttcctttccatccatcaggaccatagcaactggcatttctggcacggcccaggtgctgtcctagctgcccaagaaaacggctgggaagtctccccgcgctgccagagtcggtttggcttttggttttcttttcttaaagatggaaataaaattcaggggcgttaggcactacaaatgtcaatcttcctgcctttcattttatttttaattaaattttttaaccttcccaaatgatttacaacgaatttatcggtttcaactactgtataaaatacaagccttacaagttgcaaactgtgttgtgcattcaatctcggtgtagattcagtgggtattttcagggtccgtggtctctggtctaggtccatgggctcctgtactgtagtcaaggccaaatcaggacttaagaccaccaaagaaatttacaaaagacaaaaagaacaacaagctaccgagaaaacaactatttatatgtaatttgtttccattgtaatgttttctcttgccacaataaaggtagttttgttttttaaagtattgtagtcacaactccccttctaaacccagaaaaagaaaaactggtgcagagcagtgaagttttcgttggatgattgcaccgcaggggtcaccaaccatctccgccacgcgctactcgggggaaggaaatcgcgctttaaaatacaaaaatctgtagttttaatatgatttcctttattacccagattgtaactgaagaattgcaacgcagcgcttctgtctgggaaaggcagctgcggcagcaacagctggagtagtgcaagcgggaatctgaggctcagtaaaagtttgtaagagttgagatctagctatcagaaagcggcagcggcatccttagagaccctggggacaaaataaatgggtctcccaccagttgaatgacaagtatcatcagatcggaaacgaggctcagtttctggatgctgagtggactgtgcgtgcgggaatattttaagacggcatcgtatgtcttgcttggcaattaaaatagttgaaaaagttgctcaagaaaattcgaagggttttgtgttctgctttcacttcagaagttatcgggcagtgagttgcggcgcgaagccttaagctttcacttcacaacttaggcatggttgaaaagggctacccacccccacccaccatcccactcccgccaactcccccccccacacacacactctctctctctcccaacctttagtccaaatcgaagcccgcaaacctcaagtatatgtacatttatttcccttcagatgaaaataaagacatcggcctcatttaaaagcaaacagggaaaacagttccaccggcgccctttgacactgtagcagcgagtgtaaagaacaacacccaaaagagaaacagatggactgatgacccaaagagccctatatttaggttgatttctcagacccaggggaaaggaaatgtatcggggagtgtacgagtgcttgggtgaggactgcacaaagcactggaaaggcgcctgggatgacagcatctcgcggggctacaccgccgactccaatgcccgcgaagccgagcctgctgaggtgccgccgacttcccgggctgctgcagggacgcagtgagcaaggaggcgtggatacgatacctaccgtatttggttctaatgtgcgagggtcgcgcggggggagactgggatttcactggggagaagcatcccacccatctccgatctctcatttctgcgttccgtaaacaacacaattagagagttttgttttcggcgagtgcgagtgtgggagagagaaccgcggcctgtccactcccgaggcagctccagccccgcctattgacacctcaaggaagagcgctcccagccgctccggggctcagtgtccctgagtccccttcaactcgaagtagaagcatttggacaaacgcagtcctgtcgtctacagtcctggcggagcatcacaccgtgtgggaaagtgtgggccccgccggcaaagccaggcgagtcatccaacacttttgctgtaagagtgggggatgggactcccaccgccccctccccaaaccccttagcccacatcccgccagaccaaggccgctccgcgccgggcaggcagggggcgccggggagggttattgaccctggacccaggctgcacccagacgaagcgccggaggctgcgctgcgccctctccgcggcccaacgctctggcagcccgccccctggggtttgctcggcgcccagcaagcccgaggtgcgcgggtcgcagcgcgccctctctgcctcctgctcctaggctgccgccgctggctgtgtgccctccactcccggctctccgagcgctcgctgggcctcttctctccccacgtccgagcgctcgctgggcctctttcctccccacctgcgcgtggctgtgcggagccggtagctctgctctgcccgtgcccccgcccccaccccgcgatcacagcccccaccttggtgtcccctactccccgccgcagtcctcccgccgcgcagcgccgcgccggagagcatggccgagcgcacagcgcccactaccgcagccgcggctcggcgcagtccacccgcccgcccgcgcaacttccagcggccgcctcgcaacttttcccaagtccaccacagccgcccgccgccgccgccactgtggctccctctgagccgcctaccctacccaaaccccagaaacaaaccgaggctcgaaaaggctcccttctcctgccggccccccatcccccgcgcccccctcctcccacacccgggactagctggttggccagaggcaactctcccccgcctggggggaaggggaggggagggggagactttctcctcttctcttcccccccaccccaccccttcgcgctcactctcgcgctctctcctccctcccacccctagtctttgctgcccccacccccacccccaccccggggttgccacagctggtcggtgcgcgggactgagggctgcccaggctcctccggcgcccaacccgggagcgagagcgcgggcgaccgggagcagagactggaaccggcaggttgctggggctgcgctccgcctgccctccacccggggccccggcgcaagaggcagcccgcgctccctcccggagcgctagagacagatatgcaagatggcagaggagggggaaaagccaatagaaaagggatattgcacctacttgtggccagtttccttgccctgcctttggatctcatgctgtgcccagtcctgcagccgctggtgtgtggttggggcttttttttcttggatcctttccttcttttgctctccctctcgctccctccctctctctcctgtctctctctctctctctctctctctctctctctctctctctctctctctctctctccctccctcctgtttctctcctgtttctctctctcttccacacactcactctctgtattttcttctttcactctctctccctccctctctccctttctctcaatccacactcgctatctctccagcattgtcagtttggacaccttcgcacatgcgcgctagacgcccctccaacatctcagcgccgccaaaaaaagtttggagcgatttatcactttgatttggagatcttgtcagatggcaatcgccgaggaggcggagaaagggagccgcggggagggcggcggggggcggggagcgaacgcagggagccagaggggagcagacacctcgcccaaaaaaaggggaggggggaattgaaaaggcttgggcagaggattgattccatgttagaatcgccaacaagcttgtatcatgattattgttattgtttttcccaccataaattgcagacatttttctataccatctacgagggaagcaagaagccaggggggaaaaaaactttaaaaacattttttaaaaacccttctcctgttaaagaactagaagggctggaccctcggctaataatccaggagaaagtgagaatcatcctgaacttgagaaatctactgctgccgctgctactgctactgaagctattgcagcttccgctttcagggttgtaagcagaataaataactggttttttcctcgattttagctgtaataccaatgcttgctgccatccttgggacatttcagtattctttccctaccaagtagtaatgatcacccttgattcccgggtccgggccggcgctggcatttgacatccaaagacctcctgctttctcagaggtcggctgtcaccttccggcctcccccactgctgccccggtcgcctcccgatgcagctctgcttgcctgccattttcactcactcgcttaaacctacaacctcggggtcaaaagaaagaggagtagggaggaaaatcacacactcttaaaaaaatacattgttgaaatttcctttaattacaggatttaccaatgaagtgccactcagaaatgggaattcctaaaggggctagctgtgtacaaggtatgaatcaatcccaactaggtatagattttcttttggtacaaccttcttgcattaaacagttttgttcaataccttccatgtgctatttatgtccccattaatatctgttgcaaatcctgccagacaccataaaagaaaattacaatcttttcagtctccgtgctgcaacaatacatccttgatgttcaagttaaaggaaaagaaaagcaggtcctgggcatgagtttggcaaaggctgtggagggaaaggggaatcattgagaatgcccagtcgtacctgttggtatttattatcaaatctaggactgcagacatgagagagcaaataacaaggttcaaccccaaagggtatcaatggcctgcaaatctctttattcaagagaatcaaagttcaaagaatttgtccttgttaaggatgcctaccattttcctttatccagagctgtgtaattctgggggcatttggctgtaagatagaggtccctggagaaccaagctacaggtctcaagggagacagatgtataaggttgaaatgtgaggaagggaagtaggaaggtaaaggagggaattactcacaacaggagtaaaacaacttccaaaagagaaggctctagtgcccacacgcgtgggcacaagagaactctattatccactc

SEQ ID NO: 363 - DNA, 126553 bp, Homo sapiens
  source 1..126553: mol_type = genomic DNA
ccacgaggccgagtgcagtggttcgcacctgtaatcccagcactttggaaagctgaggcagtcagatcacatgagctcaggagttcgagaccagcctgggcaacatggcaaaatcccatctctacaaaaagaaaatacaaaaattagctgggcgtggtggcttgcacctgtagttagcttcctgggaggctaaagtgggaggattgcttgaaccctggaagcggaggttgcagtgagtcgagatggcgccactgcactccaacacgggtggcagagtgagaccctgtctcaaaaaataaaaataaaaataaaaccacaatgagatatcatctcacaccgtcagaatggctattattaaaaagtcaaaaatataacatgttgaggatgcagacaaaagggaatgcatatacactgttggtgggaatgtgaactcacttagcctgtatggaaaatgttatggtttttctcaaagaactaaaaatggaactcccattccatccagcaatcacaccacagggcacctgcacaaatgaaaggaattcattatatcaaaaagatgctcacacttatgtgtttatcacagcactgttcacacgagcaaagatatggaattaacctgtgtccatcagtggatgactggataaagatgtgtgtggaggtgtgtgtgtgtgcacgcatgtgtgagttttacatatcatatatatatatatatatatatatatatatatatatatatatctgcattccatgtagtacggacatgcagtattgcatgcacacacaccatggacgactactcagccataaagaagaatgaaatcatgactgttccagcaacatggatggaactgaagaccactatcttaggtgaaataactcagaaacaaagtcaaatactgcatgctctcccttatatgtgggagctaaataacgtgtacagacagacagagaggggaataacagacattggagactggaagggtgggagggtggcagggagggatgagaaattacttcatgggcagaatgtacactactcagtaatggtaacactaaagcccagactcttccaccatatgctatgtccatgtaacaaaactgcatgtgtaccctgtaattttataaatgttgttaagctgaaaaggtgtgtgtatgtgaacacagtaaacatgtaagtataaacacagatgtaccgtgtgtgtgcaagcttattcaggttaccattgctatgtcttacttgcttaaactattggtttttgtaaagtgcacgttcaaatcacccatgacagctatttctacctgctctatccatcactgctggatgaatgttcgagcctcattgttgggtgcgtgtatgtgtatgtatatttacagactgttacgatgcttcttaccctgaaatattcaaacgcctgccctaattctcctttggtttactctgcatgtctgtgtttctaccctttgaagcatgtcttttatagtaaaaatactatttagtatatttttaatgcagtctagtctgtttttaatgatgtttttaattgacaataattgtagatattcatcggatacacagtgatgttttgatacatgggatgtctagtgatcaaatcagggtaatgagcatatcatcatctcaagcgtttattatgtgtgttgagaatgttcaatatcctccttcttgctgcttgaaactatataatatatggtcaggagtttgtttttccgtcgtcatttgtaaccgttaacattaggatctgtgagcgtgttttctagttattctgctttattttcctctgctcctgaccgccgttggatagctgagatttcctccggatgggcagaagctcggcctgccttatggcttccgtagctgaacactgtgtcttcactgagcgggatgagtgattggtacctgccaggccccccgtccacaccctcacaccatgctgagactgtcgggggttcccattggggagtaatggtgatattctgactctctgaattcctaggccatttgggaactgtggtgactgaatatctcagagcaccctcctggcttctttctcttctggctggagaacgtctctaagagcattttaaaatcaggcttttctgtagaaaaatggccgaggccttgaaggcctaagaataacatggactttgcatgcctttgatagtttagctggatgtaaaattcagccttcaaatatttccttcaaactctgaggatggaacatcacagttttctggctctccgtgtttctcacgtatagtctgaggtcaatttgattcccattcttttttctctgggactttagaatttatctttgacattgatgttcttcaaggtcttatggcttttttatgttatttttccaccttgtgcatttccaggctgactgagatcattcacctttagatctgagaacgtcttggtcgtcgttgcttcatgtcaatgacttcttacttttgtattttgcagttagatggatgtgaatgaacacctcccttacccatttccattcatctatctctgtacgttgtctctctttacgcctccctgctattcctgggagaatctcctgagctgtatccactcaccccatctgctggatgcttcatttcaaggtatgcgttttccacactccgtctgcaccccagtccgtctctctctggctgctgcttctgcatccccaccatcctgccctcccttatcactgttctactttaaagtctccccacagcggtccattcatcagcttcctctgtgacagctcccttgctgtctgtgagcaaccaagctcactggactcctcctcctcctgctggtgaaattgtctgccctggggcctcagctaccttggctggttttagggtgatgggggcggcagcccagaccctaagggggccttcttaagggagagagagtcctatgttgcggtgtgagtgcagccctctccattggccaccccactctgcagaggagcccccagccaccacctctaccctctgcctcttccttccactctgggcccttcttccaggagaagtcagcctcagcccatgagtgccaggtgctcgggagggctggtctgtcctcacccagggagtccctgcccctgcgatgctgccctccccccactgctgatgctcaggtaggggtgggtggggtgagcccaagggagttcggcctcagtccaggttgcccctccacaccagccctcctccccctgggccattctctgggaacagccagtctctgggtctcagcggtaatgaatgcagccccagcgttctcctcaatagcactgggaactgagatgagtcccaacttcttcacttgtgtggcacccccacccctgcaaagggccccgggtgcactgggaggtccctgggtgcaccgttatgctggccgggccccagggaggagcccacacagagtccacgtaacacagcaaacacacaggccacgaggaggttgcctgctcctttaccttcctaggtttacatggtaccggagccagcagcctggtgagcccgcaggagcctgcagacctgaatcagggtttctggggattgggcaggagatgacaggcagcttccagctgatcccagggctgcagcgggcatgtgcagtggcccataaatacctttacataaatacgggctgggcgacttccagtcccagggcctagcaccaaaaagcctgcctggaggacagtggccctgtgcctgcacctgcgcctgcacccacactggcgcccacacctgtcctcagtccaactcagagccgcggggagagcgggacttcctcagcccaggcccagagcgtgcccctgggttctgcagagccaggccaggaggcgcctctcttccagcggccatgcgaggcttccctcctcaaggccacaccagcctccaagagcgacaggttgctgggctgtccacagccctccacggccctcaaaggaagggcagtaccaggagctctgggcccgtgaagtgtccttctcagtggtcaccaaaggccagggtcccctctggctgggactggagaggcgggctccacgggactgcctctactagtgcctcgctggtccaccgctccgggatgtgggtctgctggaggcgggcagtgtgcccgctggggaaaaggagaaaagagggccagtccagggtggggcgggtgctcccagaacagactgggttctgggttggcacctctccctcccacccctcccttcagcagctcagcccagcaggtgggtggggcccacccatccttcccagcctgtccttcccagctctggccccagccttggtctctgagctccagattcctggggcccaaggccccgggtgcagctgctgccctgtggggcccagattatacttaagcactcttcgttgactttgccataacccaccctcctggcaagcccacgggcattccccacaccccttacctgagccctgggctaaggacgggttctcggggagccggaggggcccacctggaggggagagagagcaggccatgttagtacccccagccttgagtgagccacagtaatggcagcaaggcgtgaccccatccaggccttcagggacctccacttcccccgcacagtctccttcccttctcagtcctttgcactcggggaaggaacgggggcgggagctgggggggggggctctccctctccccataggaaagctctcagcccctccaagcctctactacccgcgacatcaggggctttaccgaacgccaagccaagtccactccaggggagggcgcaggacccaggactccccacgcccagcaacacactgcccatggggccccaggctcctgaggcctccagctcaatgtcaaggcactgcccccggcacccggcacccagcgcaggtgccggcagccggcggtgcagtaccacagatgaccactagatgccgctgccgggcagccttttgtccctgcaccagcgcacaggctgctgccccgcccctcctctcctcgccccgccccgctccaccgagatgggggctcccctgtcttaaggctctgaacaatctgcagccaggactgccttagaaaggcacaaacagatgcacacatacacaaagtcaagactatttgggggcctccaagcggaggaccccaagtgtgaaatccccagttagccaaaaagcagagcctgcagcctggcgcccggcctttgccccgcccacatgtcttgccccgcacaggccccaagcctgcctcccacttccctctgcagagacaacctttcccaacaccgctggggggtacacggtgcgggggtgggggggggggtgcgggcagcaaagtctgggctggccagaggggtgggggcatcccaaaagcactgcctgcaggcagagagcacattccaggacagcctcagggtcctgaaggtggtgctaaggagccaccctcacacaggtgctggagcacgctcacacatgcccggcacacacgcctgtgccccctgccgcacatgcatgcactattgcgcagacgcactggctacattcacacactgatgcacacgtaacacacaggcactggcacgcacaggtgcctgctgcctgtgcaggactgcgtgcgtggactggcacgcacaggtgcctgctgcccgtgcaggactgcgtgcgtggactggcacacactgggtgccacacacatgtactggcacacatgcacacacaccctgctgtacgcactgttgcacgtgcgtgcacagacacaccctcacaccctggtgcacgtgtatggggggcaggaggggcagggatggccagcgtccatccacactgtggatggtccagcccagccatggggtcatgaccctcttcaggcccccggtgcagtttgcagcccacccttgcagctgttggggctgggaaagatgggctgtttccagctggcagcatggcccacccctgtcccctggttaagtgactgtgaagctcacactccacccatcagaagccaagtgacactctgggtaccgggtggggacagatgacattcgctatgtctgaatagccatagggtgacccggccaactccgcagtgggtgagagagggatcctctgccagggtggagctgaggctgattgggggatggtgccttcccgcccttccccaggaagcccagctcaccttcccggcacgtgggccccatgtagccatccacacagtgacactgcccactgacagggtcgcagtcagccccacccccgcagtcacagtgcagggtgcagctgggcccaaactggccccttctgcaatctgcaaggcggagggggcgggagacaaacctgagcatcatccttgccttccccgcgccaaggagcctgggcctaggggcccgcggcagagcccaggtggagtgaagccttctgcctgggtgtgtgcgggagctaagaccttgggcctcggtttcccctgaggagtaaacagtccctgccctgccttcctcagctacattctgcagccagtgagctcctgcatgagaaagcccaggccccaggcacacgtccagagtcaccaccgagttcctgccccgccccaggagggcaaacaggagccagtgttcagggatgccccctcagggcacaacaggcctgagagccacaaggccaggtaagcagccccagcaggtgagcccctcctatcctcaggtgggtccctcctatcctcaggtgagcccctgctatcctcaggtgagcccctcctatcctcaggtgggtccctcctatcctcaggtgagcccctcctatcctcaggtgagcccctcttatcctcaggtgagcccctcctatcctcaggtgggtccctcctatcctcaggtgagcccctgctatcctcaggtgagcccctcctatcctcaggtgggtccctcctatcctcaggtgagaccctcctatcctcaggtggggccctctgggctggaggggccacagcccccttgatgtcccccagtccacagctggcagatcagggaagtctttccacccaaccagagccccctcccatgaccatggccttcctgggacgttgtgggggccacacggcagggcctggcctaaggctccagcaggagggccatgcttggtaccgcatgtcccagcagctgactccagcccccccagggggcacagtccaggtgcagaggcaacaagaggggttggtggccagcccaggactggcacaggtagggcccaaccaatcaatattggtcactgatggagacccacacccacgcccttcctgggcaggaccccagactcacccaggttacaggtggctcctgagcgccctggtgggcaaaggcagagaccggtgacagggtcacagggtgcccccccgtcacagtcacagcgctggtggcagccctctccaaatgaacctggctcacaccctggtgggggcagtgggctcagtgtccccctcctgtcctgcacccagacgggacggggccagggagcgggggttcagggaggcaccaagcactcacccctctcacagaagtggccgtggaagccggcagggcagaggcatcggccactgatggggtcgcagggggctccatgttgacaccagcacaacccctggcagccagccccgtggaagccagggggacaggctgaaggacgccggttaccacgagacaagggcacacggtggcagaaatgtccagtttgcccagagtgagtaaaacccgccaatccaggggcccgagaaaagccccctcctgcccgtcctcgtccctccccactgctgctggctccccacctccccaccacttcactgctgcctggatcacccacacgggaggagtggacagtggctcaaaggggccccagcccagctgcacaggcccccaactcacggtgctcgcaggcctggccatagaagccggggccgcagcggcaggtgcccgtggcaggctcacacgtgctgttgttgtggcaggagcactccagatggcaggcggctccgtagcgcccagggggacaggctggggacagggcagggtgggcagtccttcggcaccagccttgcccagccctatggcagcccagggcacctccctgaggggatgctggggtcccgctggccccgcacactcacccagctcgcagtgccgccccgtccagcccaggccacaggagcagctgccgttgctggcgtggcacaggcccccatttctgcaggagcaggtgtgctcgcagcccacgccaaaccggttctgggggcagcctggagacagaaggcaggtgctgcctggagctctggccgagggctgggctccctctggggatatgtccccacaggctgacagtcactcggtaaatgcttcctgaggcccatcagtgccagtctctgcctgctgggcgggcacatgccagggagtggcaccagccgcatcctctcattccttggtcatctcaggctgccaagtgccaggcctggtctaggaactgagggtggctcagtcatgaaggggctgggtgagcgcctgcccagcctgcaggaaggggttcacagaaggcttcacggaggcagcggcccactgtgaaccagctgtctcccgcttgggagtgaaggcacatccttcaggcctgagaagtagcgtggctgggctgccgtgggctcagaggtggctggctgtagccctgctgttacagccggatgcctgatgaccggcctgatggcactatccttcctgggagtgaggcggggccaagctacatcccagctggggcctgagccctgggatcctgaaccctctgctgccacaggctcccaatgagcccagaaggccaagaactgctgtgggggcagccagtcccttgatgcagactaagggtgggaccaggccaagaggctgtggctgtgttcatgagcactgggcctgtctgagcaggagccactacgcctgtcccctgggtccagcccatctctctactcttgactgtgctctaggcccacttccactttggtccctgagccctgggcctggcagaaagggccagaaggactccaccctcgggcagaagacagccacccaatcccttctgcaaggggccaggcaggcgctgggtaggaacctgcagcccccacggccacctctatgaggatggggtcactgggtggcctgagcctcgggggctgagtgtcgaggtaggggctggggtggcatgggacggtccattcccccaagcagggcagcgtagtcaacacaagctacagcactctcatctcagccccagggtcaagtggggagctggtggcagccaggatgtgcgggtgtctgggctgggcccacccctccagtgtccccacggctaatccagtgacatctctgtgaagggcctgtgagcatgccctctggagtgaacactcacctcgctcacagcggacgccggctctccccggggggcagaggcaggtgccggtcacagggtcgcaggccgccccctgcccacacccacacacgtgggtgcagttggggccgaagcggccctgcggacaggctgccggggaggaagtggtgatcgtggctggcttcccttctctccctgcccggtcaaccccggagtggggataggacaggatgggatggggtgaggggaccctgggtctgccccagacagggtggggccagccaactctcatgcacccaccctggcatctcccttccacccgcaggcctgctgggggccaggccactgccgcctgctctgcagtgactcactgccacccccgcccaccccgccagctctgctggggtcccagaaggggaaagtccctgcatgactgagggaagaggcccgtttcccagcaggacgcttggccacagttgagctgcctggctgacctctgtgcctggctgtgctcaagcccctggcagacatggcgcaggtcgccgggcacagcaggtgcaggggcagagctagcagaagcctgtgggacctggggccacatagacacccccagcgctgcaggtcctttctgcccctctggcttagccccacttggggccaggcccagccagagggggctgaagggcagggaggtgggcagtcgggggccatcctcctgcaggctggctggccctaccctggagacacaggaggcgccactcagcactgctgccaccagccactcactgaggttgcagtccgtcccgaggaacccagtggggcagcggcaggcccccgtggccgcatcacaggagcccccgttgagacacccacacagctgttcacagcctggcccataccgcccgggcggacatcctgcagggagaggggctagctgcaggggctggggctggaggcttccccagtgcccctgaacacagcaaggcagctctcatgagacccccacaccctccatcttccaccccctcagatgagggccttcccggggaccaggggaactggggcccagcacgccaggcagcactgccgagtccctgggtgggcacgggcagcactcacgttgctggcagctggggccgtggtagccagcagcacatgagcaggtcccggtggcagggtggcaggccgggttctcaccgggacactggcacatctgcgcacagtcctccccaaagctgccgggtgggcaggctgggtggagacaggcagggtcggtcctggcccagccccgccaaggaacaggcagcctctctggattccccctgcccagccgctcctcggggtgggggcttgggagcacctaccctgctcgcagccggagccagtgaagccagggggacagcggcaggccccagtgacgtggtggcaggcagcgccaggcgggcagctgcagcgctgggcacaggcctctccaaaccagccccgcaggcaggctgcagaaagatgagggctgcggaggcttctaggaggggcccgtggggatctgtgggccaggacaggccgggagcaggtgctgtgggtacgacccacccaatgctggctgaactgggggctgtgctcaccattctcacacctggagccccccgccaccccggagggcagaggcaggccccggtggcaaggtggcaggggcctccccaccggcaggcacagcgcccctcacagtgaggcccgaatgtgcccttggcacaggctgcagggacgagacagatagggctgagagctcagcctctggcagccccgccccatggaaggcgaaggagccgggagacagcagccggggctcagcactgaggcgacgggagccagcgacagccctgaggccagccgagtgcccaggcccccctcagacagcagacccaaggctcctgacctgagcaagggaccgcccaagttgtaccccaagcagtggggacggcgcctctgctggaaggggggctcgtgttaggggcttgggtgggaggccggggctttgaggaatgaggcagtgttgcccttgcatgtctgggctctggaggggctgaggccccgctgggtggaccaggccctgccggcacagcagccacagccagactcccactggcaggaggcccccagccagcacaggctccaggacaaggggtgaaggggcccctctctgcatgcaggaaacaggaacggccccctgagccccaaagcatcctccgttccacccaccacagggctggctggggctacccctgccaaggcaaagcagcagcactctgtccccacaggccagcttcctaggctgagaccctcccaacagggtcttagtgctccgacggcagctcttgcattcacaggacaacaggtcccctggtgaggccccaaaccgggcacagtcctcagccctgcagtaaggctgatgccaccccttcccagcagggcctgcagacccccctgctgccccgccccactcacggctctgacacttgtccccagtccagccggctgggcagaggcagcggcccgtgtgcgggtcacacaggcccccgttgaggcaaccgccgctgtgccggcagccagctctgacgtcccgggggaggcactctacaggagcagaggcaggcacgagggtgagggtcctgcctcctgggcccaggagaccctgacccatgcttcctgcacgcagagctgaagcctacaccccagggcgctgccccctgacctgggagccctcctaggcctgcaggcggggctgcaccaagcatgctggggtatgtccctcctctgccgcccagcgctcacccttctcacaggccaggccggcccagccctctgggcacgcacagtggcctgagacagggtcacaggtccctccgttctggcagaggcaggaatgccgacagttgtcgccgtacaggccggcagggcaggctggggccagggaagagggagcaacctgcatcccccagccagctggccccacagggtctgtctggctttccagccccatgttggactttggggtcaggcaccttgcagggggctgcccctaggatgacctgccagcccagcctcactccccatccctgcctggagaggggcacaggtgaaaggcacggtcctcagtcctaacagccccttcctccctcccccaggcaccaagtgtcctgtgggccctgcaagaggccagcaccctcgctcaggcctggaccccggtccctggactcctagatgtggcttaccctgcaggcaggagggccccatccagccaggggcacagtggcactgcccgtggacagggtcacaggaggccccgttaaagcaggcacaggcctggctgcaattgtgcccgtaggtgtgggctgggcaggctgcaggtggagagggctggtcagagccaggggtgggcaggaccccaggggttggcagcagatcacagccagctgggcagatctgccggggtcccctcggctgctatggccaactctcccctccctctggctcaggccacccactcagcagagtggccacaaaaaaggaccaacgctctggcccgagtgagcaaagcatcactctcaggggggttgcctggtagcttcagacactcaggacaggtggcaggagggagtctcctacggaggacctggcaccccctcctgcagcaccccgggctgagcagggacctcacgcactctcggcacagcgggggccccggcggccagcggggcagaggcaggagccattcacggcatcacaggcagctccggcggtgcagttgcaggcactgcgacagtccaatccaaagaagccggccgggcaggctgcagacagcgggcagtgatgtggaggggcccacactggaggccacccagcctagcccccgcctgtgccgtagctcaccatgctcgcagaaggtgcccctccagccggccgggcaggtgcaggccccgctgacgtggtcacaggctgctccatgctgacactggcaccgctgctcacagccgggcccaaagtggccctggggacactctgagatatgcagccccggcccacagtcagccagagggccaggagcctgacccagccgtgcccgggccttgccgccatccccaggactgtgggacaggcctggctcatgagaagccccttcctgcccaagggagactgggctcactcacatgcttcatcccccacccaggtggggccatgggaggcttgagggggctccaggcatcagctttagggatgggaacctccccaggggctgtccgtaggacgcccaacccaggcctcccccgattccaccaaccaagcctcgggggcacacactgagggataccagcctcagtcctaagcagaccccttctccatcccccaggtgccaggcctcccacagtgggggacagaccctgccccctcctgctgcggctccaagtgagcctggtgcaggtcggtgagagggtgggaccttggtccaggctgcgaagcagagcagtgggggctgggaaagctcaggaaaggcagaggaagccaggccagggcccagccgcagtgcgcatgtgcgtgcctgcacgttttggtgggtgtgtgcgcgcacaggagggggcgcggccaaaggcttcgtgtgtgtgcgtgcaggagggagtacggtcaaaggctttgtgtgtgtgcacgtgtgcatatgtgtgcgtgtgcgcactcaggagggtggcagccaaaggcagggccgggactcacgctgctcgcaccgcgggcccacgtagccagcctcacacagacacaggccgctgatggcatcacagctcccgtggccagcgctgcagttgcaggggtggctgcagtcaggtccccagtgcccagtatcacaggctgcaacagaactcagggtcacccggcgcaggcccaagcgcgggccacgggcaccacagccgagtcaggcacaggggcgtctcaggactggggcaaggcctcctgcaagcccctagtcctcgggggccctgggcagaggcctctccaggggctaggaaaggagggatgtctggacaaagggcaagccaagggcccccgtacctctctggcagctaaagccggtccacccgggggcacagctgcagtgtccggtggctgggtggcagtgcccatcattggcacaagagcaccttgtctggcagctgggaccataccagcctgctgggcacactacaggcaggcgagagagggtgagtggggcctggccacctaccccaggtcaaaggctcaggggcagctccagctcactcaccgtcctggcagcggctgccgacgaagccagggaggcacaggcaggctccggtctcagggtcgcagcgggcagcgtgctggcatgctgggcagatctcctggcagcccagcccccagcggccctcgggacaatctagtgcccacccccatggccagtcagtgcccaagctgcccttgctcaacacatcaacataacatggcacgatgcccctggagccacggccgaggaggtggaaccactgttaccatctcagcctgccccggggaggggagaggacccgggcacctcctggggctgcaggctgcggggtgcgcacccacagtagaggacccccagcccccggcaccgttcagctggcaacacaaggagccgagcccgttagagatggagcctcatgcagagagggagcagcccgagagggcagcctggaagccccaggaacttggtggggcagccacagaccccccctccctaccccaggggagtgcactgtgagctctcacacctgctatagacgggcctgggatccgcagggctggggcccccacagttcagggccccaccagcttggagccgtgcagcctggggaggcggaactggggctgcggctgacactcacctgcctcacagtcttccccagtcctccccggcggacaccggcactgccccgtgaccccgtggcagggggcccccccacaggagcaggagctcgagcagttcacgccaaacgtccccaccgggcactctgcaggagaaagcacgaggggccttagccgcaccacgtggagtggactgaccagagcctttcccccaggggctcctggtgagtgtgccccctgtgcctcacatgggctcctggcgagtgtgcccccccggcgcctcctcacatgggctcctggcgagtgtgcccccccgcgcctcctcacatgggctctggctctagcccccgggggtggggctgctgagcacacctggggtccccagagtggccaggcaggtcacaggaacaggcaagggaggagtgaaaggggagctgacggatgggaggagaggggaggggcagggctgctggggcagcgtgggagaggctgaagcagatccctcggccatccaggaccctggagagctcccgggagcccgaggtagggcctgctcttcctccgccaccgtagtcaccagaggacctgtcctggtcaggccagtgtgtccccagtccaacctggcgatgctgatccagtctctcccactcccctccacccagctgggagcccctccagggactcggcccgagggctggggaggctgtgcacccactcactccacccgcagagtcactgccctttccctgtgggatggggctagaatggggagggcagggggcctcctggaggcctagggtcccccctgctccacccggcaggtgaatgagaccccagggagcacagaggccagggagtcacagcatcccaggaagggggacctggggagagaacgtgggggctgaggattgggacccctggagagggcctgcaggggctgctccccatggcctggcagagccgtgggtgctggaagccctggagtgacctccctggcagagctttcctctgccctcccacgcctgccctgaccttaagggcccggccttggcctctccagtgaggacaacagagcatgaggctagccgggagctcgggtagcagcgaagcctccctgcctcccccagcgaggcgcagccactctgatgccctgcctgctgctggaactaaacctctccctgggctcacaatggcatcacagcagccccaagaaggcagttgacagagaccccgtgctgcatgccaaagatccacagagcccacgtgtcagaaggcccacagcggggctgagagccaggatgtgccctgcctggggaggagcaccggtaatacaggcggagcagcagacctgaccccgctgaggccctgaggacacaccctggtgaacccttgtcaccagggcccatccccaggggcacccgcccatagggacacaggcacgtccctgggactacaggcctggcactcaccgtgccctagggcactgggcagtgtgcacagggctgggtggcgtcagggaacccccctccactaactggagcagatgagtgctgggcaggaacagtttccagacccaacaagaggggatgttatctttataaagagtgttgatctttctatcaacactcggatgtcatcgcctgtggcttatcctcggagcaccacaggctcttaaagaaaagaggggaaggggcagaggaggagcagaggaggggcaggggaggagccttcctcctctcaggaactgggggctccgggagtggtggaggtgcttctctggcgaggcctgttcactgtctctggtatagagagcagggactggaaggagggtcacaggcatcaggggagggtgagctgctggtgtgtgtctgcatgcacctgcctgcattcatgtgtatgtgtgtgtaagcagtgtgtgcatgtatgtgtgtatgtgtgtgtaagtggtgtgtgcatgtatgtgtgtacacgtttgggggtggggagcgggaggaagggtggggaggggatgctggggagtcaggaggagctgagtcccatgtccgcgcactgatgaagccctagggcttgtgcacagatgggaagtgggcgctcagagctgctgcacaccggcctgagaccacagagcttctgccagtccaggtcaggagtcttggcctagagtgctccggcccttagtggctgaggccagggtggcctaagagctggctagtgggtccttgggtggacgttgctccctctgcggaccccttctcattccccagatggaggtggggaggggaagggcccatgctgggggggcttgagtccagagagccccctggtatggccccaggggaggcagaggagggggctggccccaggggaggcagaggagggggctggcgccgggcttctcgctctctccagcccaggccatggtcatgctggtcacacagcaggccctcgtggctcccgtctctcccggccaatgggcgtggacagcgtgcgccatgccaagggaggctccgacctgcccaggccctgttggcggccgctgcggcagctccattactcatgccgagggcgtcttccttcccctcataagccgatgacacactcgggtatttcctatcctggtcatgagactgaggagtgaccatcccgctgagcctcagaccagcttggtcagctttctgcttggccaggaccacacaccgttgtcctggttattgcacctcccgccagtgcaagctggggcagccaggacacccccaccttcccagccctcttggcaaagcccccagccccacgcacgctgggctggaatcgcgtcgggcagttggtccccgggtctcccaggaatacctaagcatggactccgctggtccatctctcagccagctcctaacagcctcctcccctgcctgctatgtgggcatggggctcccaggctctgtgcctgctcacacccaggccaaagcatccacgtgcaggggcctgcagccacgaccccaggccggcactgcacccagaccactctctgaaccgccacctccaggggcagcctctgctgccggctcacatgtgaggagggagctgctgccccggcctctgagagaagcccagtctgttctggtcaagcaagaagcaagtggaccagggaggagtttggagagaaactggcccctccccaggtcaggccctgggcagacagcagctgctgccctgagcagaccagactgagactagcagccgcaccactgccatgtgacaggccgtcaaggcaacaccggtagcaaggcaacaccggtagcaaggcaccacctgggcttaggcaaagggggccgatagtgacagctgtgcagcccttctgaagcctaccctccagccaggcaggcagcctacaccccacaatgagactgccgggagccccaggggccggccactcaccttggccacagtcctctccctggaagccagcaggacaccgcttcccacactcgccgctcacggagtcacaggccacgcccactgggcaggtgcatgcctgccagcaccccggcccaaagtagcccagctcacactctgcagggcgtgagagaggggtgggtggggttaaccgaccctggcgccccccgcccccagaccccatgcctggactcacctgcctgacagcgctcgccccggaagccagccttgcaggagcagctgccatccctcttgtcacaggactgcgtgtggggctgcacacactggcactcctccgagcagcccggcccaaaggcccacggcgggcaggctgcacccacagaaccgttgaggggggctcccgtctgaagccccaccctcccagaccgcttccaccagccctgggtcagccaggacgacagccaagatcatgtagggagctgtcctcctccacctctccccctgcagcccaccgccccttccctgagtgtctgaaccccagggatgggtgaccccaccagggactcagagcttggccttgctgccaggaatctccaaaagccaagataggcctcatcccccggaggcttctgcaaaaggcctggccctgccctcatctgcagccctaccacccatcaaggctgggaggcacaaggttggggaccatccacccagacgccctggatgccagcacagtcacagtcgagaggatgtggcttggagtccacagactcatggcggaccccagacctacatcccagtgggtgacctggctgggccccgatagcctcatcctaacccagactacaggtaacaggacatggaccatcccttccacccgctgccaccaccatggacactggaaggggcagtgagactcactgaggtggcagaagcggccgtagagccctgggtcgcagaggcaggccccgtagaggcggtggcaccggccccggttggcacagttgcatttcttgcgacagtgcttgccatagtagcccttggggcagcctgggggcagcggggctccatgtgaaccttggtggcagccagcctaccacatgtggtccccccatgtggtaggatgcgcgggggcccagggcccagcacaggagctgggagcagcccccgccagggcactaggtgagccttccggatgtggccgtctgccctggctggtctgtcccctacatcccctgcccccagggtttgtggcaagggcgggtggaagagcacattcctcggcccacactggagagatgcacaaagctcacgccccactctccccaaagtctggcccccatcaggagccgcctgacttctgtcccctggtggtcactaagcttgatctcagagcctcaaagcgggaaggacacgtggccccagtagacaaggtcccaggcccaagccgcaggtggccccagagctagaaaggtcctcgcctttcttccccaaacaattctctctggctgggtcctgccccacgtccttcctcctactgaaggcggtagtcagctgaaggtacccccacaactacatacacgtcctagtccccaggacctggagactaggcacagttgcatttcttgcaacagtgcttgccatagtagccctacattatccaggctggccctgaatccaaagacaaacatcctcatctgagaggcaggcggaagccgagacagaaagaggaggcctggagaaggggaggtgacccctcaacgctgcaggcagcctggagggtacagcacgatcccaggggtgcagcacccaggaatgaatacgggggttccccagcaccctgtagaatagaaagggcagacaaagtggggaagggaggcacactgacagggaagaggtaggaagccctgtgtggctgcctggggtccccaccaccaccaggcaaccagccctgcagagcccagcacatacggccaggaaagctcacggggccacctgggggacaggttctagggttggctgtcttcctctcacaaaggcagaaagtttatgatacgttagctgcactctccatcgaaagaggcagaaatgatgaagtctgaagacttaaagatgaagctttagccacctgggaaacattttctggactaattcctccagaaaggctgaaacttcagagttaataagggagccaacatcatcccttgcagccactggcccccaagtaatcccttctgcaaacctcacccagccatcaccagctctacttgaatgcttccaggaacagggacctcactgcctctcaagggaacccattccaaaagtgctgctctgtagtcttatcgtctgctacagttaggccctgggaaaattagcaacagtgaaaaagcaatacccctctcattcaagggcctcattctctctcaagcacagcctaaagctctggagacagggaggcaggaaggaaagggagtctaggaaaagtttggtagcagtttccctgctccagtgggaggaaggagacaaggaggacgtggaggggtggtgtctcccacttcccttacagcccaggggtaattccagaagcaccagaagaggctgcacgcaccatcctcacagttagttccactgacacccggggggcagcggcaggcccccgtgacagagtcgcaggtcccaccattctgacagctgcaggagaagctgcagttcttcccaaaggtgtccggaggacaagctacaaagaatgacagggaagcgtcagggtcaccagccagcacgacactctgagaccccttcctagggttggaggcttgggtttagaagcagttgcctagagataaaatgatggcacttgtaccacatcacccctgcccatgctcatggcagacatcactaattgatcactgactcctctctctgaacaccagcagagagaggagtctcctccttctgaaccagctctttcaaacaggcagagcctcactgacagttatgacgggtccctggccatctgagctagaggaaccccacctgccggctgcccttcagcagacacccctcactgtcttagttatttgctggcttgcttgttgctggaccgtgaagactgatatttaggaaggacaaacactttaacttgcttgttcccagggaatccttactgcctggaacagtgcgtggcatagagtggacagtcaggggatgtttatcaaaggaattaacaaatggatgaatgaatggctctgcacagagccccctgcccagggccagcaggcaggagtaaaactgaatgggctcaaagggctgtccccaggtcttggggctcagaggccccttcccagcccccagcccctgcccagctgcctcactctcattgcagatgagcccagtccagccctcggggcaatcacagccatccaggcccaggaggcaggtccctccgttcctgcagtcatcacaggtcaagctgcagtcatggccaaaggagtcatccaggcagactgggggcagaccaggatggggggattcagagcctgacccctggcctcagcaggcacagaggcccggctcagaccctcaggccagggaaggggcataaggggcatcctcggcccatgagggcccccaaagggtgacatggggacagatgctggggccagaaggagccctaacctggaagctgtgagcccggtcccgcccggctcagcccgcacgagctgcgcaaactgagccagtggctcaccctctctgggccttggtctaacatggcattgcaggggtccttcctcacgtccccagcctctgattggatggcagcctagcccgaggggtcgctggctgctggccctgcgagcaggagcccccgggggctgggcccgcgctcaccaaacttctctgtgagcgtgtgttcgccccgcaactctgcctcttcctcatcggccccgacgtcgtcatcctggaagagttgcggcagctcgtcctggagcacggcaatgtggggcaggggccgcacgaaaggcagctcgccgtccaggtccaccatcggctcctccagggctgccaggggcacagaggcgccttagcccctgccacccacctgcctgctccagcgaccccccggcgggtagggctgggcctaagccccaccccagggaaccccaccaccctcctactgcctccactacccccacctcctcagcctggtcccaggggtcatcccagctgcacccgaccctccttctcaggaaagagaaggctctgggccctgaggacctgaacccggcccctctgcccccagcctcatcccaactctagggactctggggcctagaggggtaggggtgggagcagctgccatcagtcccagggacaacatcaccttaggtcttggtcccttctctcacgtggtcaggacaggtgctgggctccgggaggatgcctgtctcaccagcttcccccaccccactgtccccaacccccacacggccctcagaagaggcaggacctcagtgggtccccaagggcccaagagcctctgaggtgtgttggcccagagaggccagggggcaaaggaccccaggcaggtgggggtggggtgggccaggcctgcgggacgcagggtcagctggggcaaactcgagaaggcagaggccggtgctccgcggagggcgggagactcacggctgcagcccctacggtcctcgtgcagccggtagccggcctcgcaggagcactggaaggagccggccaggttggtgcagtggtgctcgcagccgccacggctggaggcgcactcatccacatctgcgggcgacccgggaccactgaggcctgtgctcccaggtggggaaccaggaaggcccctgcccacccagtcctacccacaggactgaagccctggtggccctgccagagctgagtagcatctcttcaaccagccagtaaaactcaccctcagccacagaggccactctggccatcctcccagcccagggtcagagccatggcagacacgtgctagggggggccaggctgggaggggccggccaggcagcagccagggggacaggcccagctccaggagagagcggccagtgacctcaggccagagggagggaggggacaggtcagcacagccctccaggcagcaggcactcaaccaacacccacagccctgcacgcagcaggcgctcaaccaacgcccacagccctgaactcagcaggggctcaaccaacacccatagccctgcacgcagcaggcgctcaaccaacacccacagccctgcacgcagcaggcgctcaaccaacgcccacagccctgcacgcagcaggtgctcaaccaacgcccacagccctgaactcagcaggggctcaaccaacacccacagccctgcacgcagcaggcgctcaaccaacacccaccacagccctgcacacagcaggcgctcaaccaacacccacagccccaaagcaaagcacagagcaggccgaccccatgcccaccatgggggtaccagagccagccccgtgtccttccttagggcagccctgctcccaggccaccccagctgtgcagtggcagggcagtgctcaccctcacagccgcagccatcggcactgagccggtagccggcgtagcagccgcactcgtacccgccagggttgttggtgcacacctgctggcagcacgggctgtctgcacagtcgtcgacatctgtggagcacacgccacgggccccctggtaccaggcacctgcacgtgcacacgcccccacccacacacaactgcatacgaccacacacaacccacgcgcccgactgcacctgcagctgcccacagcctcacgtgtgcacaccgacattcatggcacctgcagacaatcgcacccaccacacaatcacgcccacgcacatgcacgttcctggtcccgcatatgtgcacacacaggacacatgtcacagccccagggccacccgcctgtctgctgtggacaaggtgttgggactggggctagagggtggggactccatctgggagtcagggtctggggtgtgacttccaggacactgggtccttcccaggtgaaggggtggtactgaggaggtgctgatggggctaagggggtgccgtgaacatgggtatgggcctggcgggccgatgtgggcaccaaggtctttcccggccaggatgctgcctctgtcagacctgccctaccaccccgccagggcccaggcagccagaccaggactcagggagactgacgaggacctccaagtcatggcatggaactgatcccagacccagggcagcagcgggtccctggagtggggtgcaggcatctgggaggagccagtgcgcaccgatgcaggtcctctgatctgtgtccagctcgtagccgcggggacatgtgcacaggggcccagcactggtgtggctgcagccatgggagcagccgccgttgttggcctcacagctgttcacgatttccatctcaatccctgccgtgagaccagccacccagggtatgggatggcggctaggatgacccccacctaccttagttacccctacctccacccagcagccagcctcgggcctggggacacccgtgggaagcagcaacatggagctcccaggccttgttgggtctgggaccccctgctctccctcgaccctctgctcaccaagggctcacacccagggctgcccctgattgacaaggaagccctgcccttcagccaaagcaggcctcggggtcctggggagcagcatggccatcccgggcaccttcagcctgttgccggctgcccactcacggtagcactgccggccatcggcgcccagctcatagcccgcgtgacacacgcacttgaaggacccctgggtgttgaggcagccatgggcacactgggccagccctgcggcacattcgtccacatctggaggggagagaccacagggagggctcagaggtgccaggaagggcctttgcatgggaccagtggaagacagtgcacggcctgctgacacccagggcctgtggccgcatgacacaggcattcaaggccaatcccactgtccctgacggccactagtcacagccctgcaggtcccctgggatgaagaagttggcacccacacaggtctcacactaagcctgttgcatgaccaggtgccagtgcccaggcagcactttcctggtgtcagtgaggacgtggaaccacacaccacgacaccccgtggccatccggcgggggcctgatgatatggtctggctgtgtccccacccaaatctcaccttgaactgtaactcccacagttcccacgtgtggtgggaggagcccggtgggaggtgattgaatcatgggggtgggtctttcctgtgctgttctcatgatagtgagtaagtctcatgagatctgatggttttaaaaacgggagtttccctgcacaagccctctcttttcctaccgctatcgacgtgaggtgtgacttgctcctcctggcctcccgccatgattgtgaggccgccccaagccatgtggaactgtaagtccattaaacctctttctttagtaaattgcccagtcttgggtatgtctttatcggcagcgtgaaaatggactaataccattggaaactgaccactgcctggtctggacacacaccgctgcctcagagactcaccctgtggaccactggggcagtggcagcccgacccctccccaaggctgcttggcccagggaagagtcaggaacacccagacgtgcagggacagggttaacaaataaacgtcgcccagccatgctgcagaggatggtgtggtgtggcagagggggcagcggtgtgttccaaacaatggcacctgcctgcaacctgactctaagcaagcacattcacaaacagccccagtgaagcagcagaagcagcccatcccatacgtctaggtgtttcctgggctcaggaacaatgtctcctttcttcttgagttctattttttttattattttacttgtttatttatttatttatttatttttagacagggtctcattctgtcacccaggctgtagcacactggtgcaatcatggctcactgtagcgtcaacctcctgggctcaagtgattctcctgcctcagccttccgagtagctgggactcctgcctcggcatcccgagtagctgggactcctgcctcggcctcctgagtagctgggaccacaggtgtgcaccatcatgctcagctagttgggttttcttatttttttgtacatacaggatctcgctatgttgcccaggctggtcttgaactcctaaactcaagtgatctgcccaccttggcctctcaaagtgctgggattacaggtgtgagccaccacacctgggctttttttttttttttttttttttttttttaagagacagaatcttgctctgccacccaggctggagtgcagtggtgtgatcatagctcactgcagccttgacctcctgggctcaagtgatcttcctgcctcagattccggagtagctaggactccagacagcaccaccacacctggctaattaaaaaaaaaattgtttagagacagggtctcgccatgctgcctaggctggtcttgagcaacttggcttaagtggtcctccctcgttggcctaccaaagtgctgggattacaggtgtgagccacagcgcctggctcatttctccttttctcttattcatctcttcagttttcctgctgggcaggcactacttaggaaatacaatagtttaggccaggtgcagtggctcacgcctgtaatcccagcactttgggaggccgaggcgggcggatcacaaggtcaggagattgagagcatcctggccaacatggtgaaaccccatctcttctaaaaatacgaaaaattagccaggcctggcggcgggtgcctgtagtcccagctgctggggaggccaaggcaagagaatggcgtgagcctgggaggcggagcttgcagtgagctgagatcacgccactgcactccagcctgggcaatagagcgagactccgtctcaaaaaaaaaaaaaaaggaaatacaatagtttaaaaactataagcaacacctgggctccctggctcactcctagtgaaatgagcctcgggctgggagcagcttttgcgagccttcctaccctcgcccctcagcccccagcaagggagatgagaccgccacatcccaggtcacccaagggggcaaggccaaagggcctggtctcatgggaggccacggccccagagttagacacgggtccctccacagcacctgggtgcgctttctgaccctgggcggggcggagcaggggaggggcgtcctaccttcacaggccttgccgtccgctgctagctgatagcccacgtggcactcacagcgggcgaggccccggaccacctggcacctgtgcatgcagctgccgttcctgttggcacacgggcttctacctgcagccacgggcccgaggagggggttggggagaggggaccccagtggctgcagggcgcctgcccccaggcttcttgtgagacccctcacccagtgctctccccactctgtgctccaggctgatgggctgggcagcgggtctccctcctcccaggtgcgggaagcccccaagacgccgagaagactctgcagtctcaggacgcggccagccagcccaggtcaggcagcggcccaggccagctcctcccaccacccttcttagcccaggtgctggcgctgacaccaaggcggcggccccccagctctgtgactccagccccttcatgcccacactggggaggacccagaggcccaggtgggggcattctctcagcacctgccccacccacagcccccatttccatattctggaggaccactgagtctgccgcaccgtcaccatcagcaaagccccccctttccacgcaagcagccctgaggactcagagcaaagtgccaaaccggactggcctgcctcctcctcccaagggcagcaagcctcaggtgggcacctatggaagtgaggtggcccccatcctgagcttcctggccccaaatgtgccatccctaccaggcctctcagcagccttgggggcctcctgaagacccacttccacccaacagcccaggcgaggcagcttgtcctgcctccacccccaggtcctccctcccaggctggcagcactcacggacacaatgcctgccgtcctcctggagctggaacccgggccggcactggcagcgatgccgagtgattgtgagctggacacagtggtgctggcagccgccattgcccagggcgcaggagttaatggctggggacacagggaggaccccaagtcagcccaagaggatgcctggccgacagtctgtccctggctggcatggagcagggagtggcatggccacttcttcctgctgtaggacccctcccagccactccgagcccctccgccttttcatctccatcgtcacacgctgctccctgcccggctcacaggcctggttttgccttctctgctgcctacaggatcctcaggcctgtgggggattcactggatcctccggccccggcctgatcgagggctggacacagaaggggaccccacccagacagaagcccagcaccccccagcacagaacactaagcaccaggggtctctgagaagctgcaagcgagggctcagtgccccagcaggctgcatctccctggaggaggacgcaggctggcagggggtgactgagacccaggcatctcaccatcgtggtccttaggccagggtgggggcagatgtggggatgccgtggacagctgccatgggccacaggcttggcccccagttcccaagggaccagcacagctcctacccaccccaggccaggccacacctcacgcctgtccccacgcattgcccatgcccccattccttcatgcacattcctgcagagcatggactgtggggtcaggttggcccagtgggtgcctgtaccccgtggatggatggggctgtgccctgagctggcgcagggaggcggggacagggcgctgggccaggctgggcacccagggtgggcactggacctctgccaaaagcggtagccagcccctcagcgggggtttggttactgtcaagtctggcagttgccttgtggttagggagggagtcagccccgagctcagagggaagccgcaagaatgtgctgttgcctgtgcccgggcaggggaggccgtctgcccaggcctgtgcccagagcaatcccaaaccccattaccaaagcgccgagactctctcagagtggggaggcttctttgagatgccgcctcctctggggcacctcctgggggactgccaccatccctgggaggtgcctgggcctggggccgagtctggggaacccgtctactgttgctgcatagcggatgggaagcccggcaccatggaggggagggcggtcagaggtcaacagagcaggcagcggctggagcagcggtgttgcctctgggccctgagaaggcaaagccccctcagagcaagctggcttaaaaacccaccgtgctcgccgtacctgtcccacaggggagcaggcgctgagggtcccctcctggggcagagccagccttgggaggctattgggggtcgcagtgatggctctgtctcctgccccacgtgtccctggcacgtgcaggctgtggggaacccagggcagaactcaggtaagcccgtctgcctctgagcccctcgccccatccacctaactgcccagacaagatgggagctgtcctggcccccaggcccggcctgcctcacctgagatggccctgctgaagccactaccgtggctccaggggcctctgagcatggcctgcgccggccccgccttcccaggggccctgtttattgtgttcaccgcagcaacagcacccctgtctggaacacgtaataggaaacagaccccctcctggcagggccaggcaggcacagggggcacagagcccatggcagggaagctgggccgtcaggatccaggcgccacaagggcccaggaggctgcggcagggctgggaaagaaagaggcttctcatcaccccctccagacaggcagagccctgagacgcacccagggaccaccgggcatggcgcgcactggagcccaccagggcggggggatcagaggcagggatccccccagagcctgtcctcttgccactccagtccacacagttctaacaccccagatgctcccaagctgtgcgcagccgggagccaagcccagtgtcgtcgcatatatcctgtgccacggattcccggaaagctgaaccaggcagattttcgccagcgctgggatatgcagctcaggaggggccacccctgcgtggccagtgcccagcactgctagggatgtgtccagacccctcgggacactgagacccagctgcaaaacacacagcccagccacccctacccaggccacagccaaaggctcacacctgttacagcctgcaaagtggaccaagctcagacccggcaaagctgagtgtgcccatcagacgtggactggggatttgcctcccagtgggggaagaccctccctgtctgtgctccacagccctcacctggctcacctgcggacagatgcgggctcgacagcaagccctactgtgtctttcacttctttaatactgaagtggtgttttctcaaaggaaaaaatccccacccagtgggggtttgatggtcagcatgcataatcgcaccgcgtgcttccgcaatccggcccgacatttctgccccttcctgactctggagtcttgttctgccaaggcctaactttggtccttgtccacttccagatcagatgcaactgactgttgttgggggacactctgttatgaatggaatgtgtcccccctaaaaaatcctgtgttggagccttaatctccaaggtgaatgtatttggagatagggtctctgagagggaagagggtggggccctgaccaggtaggattcatgtccttgtaggaagagacacagagcactctcttcattatggcagccagagctgcctgggtcaccctaactccccagtttgccaattctaggagacatcactccagcccagccacatgcaggtccactcgggctggggtgcaattccaacctctgccagcaggaggcggcaccacccaggattctgccaaatgtgagggtgaagctctgcaaaggtaaaggggcctccttccgtctgagctgccttggtctctgctcgaggcgcagcatcctgggcggcggagggagtggagggtggggcatcagcggccaggcccagcctctgagctcgttggctgactggcgggctgcgccgaggcaggggctggacacaggcccaccagctcctctgcccaagcctccaaacccagcccagtggtttccaggccagctctacagggtggttctggtcccgttggtttctggttctggtccctgctggtttcacgaggcttgtaattactgccctcagatagggatggtttctagatcttgagtctcctgccacgtgtggtcagtagtcacccacagccctgccttctaggaagccctctgttggggacagggccaggatggcaggctggggtgcgtgttcatcccccagctcccctccaggcgggcctgccctgtacacctgcccccatcccctgccctctcaatggggcctccttgttgcacaggggcactactgactcacagcctgtgagagcagctgtcctcgtccacacgccaaggggtctgagcccatgatgtcaccccaacaacacagagcaccaggcaaacaatggcccttcagcatggccaccaggcgtccagaaatggagcagggagggaaacgcccgccaccccccttccatggaccaggctaagctgaccccacaacccacaccccagcaaggcccccacccctggccagggccagatcatcctgcccagcgcccgcctttctgggtggtcagctcggcccatgcttggctgcagtggtccagacccactggccaaggtgacaggtgggtccctatagacaagtgctagcagtgccctattggcctaccaggggcaccgtgtgctttagggagtggcaggcagcagctggaccacacacatggaatgaaggaggccagacggcgggggccaacaggggcactcccaggtgggagctgcacggcgcaccatgggcacccaatgcccgcagtgcttgcaccgccacacgcgcctactcgctgctgagcgtcagctccgacctgccctcctgggggaggccccgacccagggctgcgtgagcatcacacgggttcagcttctccagagcgtttaggaaggcgccttacttgtcaccagagtcccgggagggcaggcctggtctatatcgacagggcagcaacccactgcctacgcagtgcccggctccagcacaccaggcggcggtcagagggcagcaaggcggccagccctgacccttcagcacaagccaacggcctgccagcagcctcccctcccgggccgggcctcccctccaagaaggaaccaaggggccaggggagggggtctatgcagcctctcactgctgtgatggggagacccaggcctgggtagggaagagtctgccccagggcacacagcacacccatggcagagccaggtggggaggcagggctgggaggccacccccagccgtgtgcacatgagtccatccaactctgggggacacagggaggggatggccaggccaccagggtgtgacaacagagtcccctctccaacagtgtccatcccaaaggcctgatgggcatgggccgagaaggggagaaggacagcgggcccacctcttccctggggtggcacagcgtgtttcatctggagggacctctgctggtaaagccagtgacatctgtggccctcagacagggcccaggagtgctgctcaacccaaggcacatgagggaacagccatgtccaaggctagggtccagagtcagccaggccgcctccggggtcatgcgcgggcatcatgctggctcagagcagcccaggtacacagaggcggaggcctccagcgcagtgctagaccacatgggagctgctctcctctctgagtgttgcacgctggcactctgcagggtgtcacggaaaaccaagaatgatgcccccagacactcgggccagaccactgctccctacatcaccggggaaggcaagggcgggctcaggtttaggggctgagaatgagaagcaggcttggccccaccctcgggcctcactaggccctgctcttcccaccccagagaccgggcgccctgggcaatggggcacaccaggactgagcggccggggcaatggggcacaccaggactcggcggccagggcaatggggcacaccaggactgggcgggcagggctggggaacggggacccacactctcacagtgtgggagccactggcaaagtccttcttgtagattctcgcttttgagaggggaacccttttggtgtctgatttccataagataatctagaaggcagggaggtgtggaggttgtacctttcctggcctctctctgcctcagagacaagttcaagtacgtttcaaggcccctctggagtgttttaaggcccccctcaggtgcagcctcctctggggccttcccagattgctccgggccctggaggtgtcagccccctgagagctctggccccatgctggggaaggaagggtggatttttaggcagcttctccaccagcctctctgcaagcctcactccaagctgctagtggggagtctaaccgcagagcctcaagcccgtgggggcatgttccttgtccccctgcaaagccccaggcggggtcacgacaccctcccggccaggaggaccctggcaggcctgggggaggggctccacggcagccccaggttcccgctgagcagcccgccctcaactggcccatgggggtgggagaggccactcctgaggaccgaggcctgggcagagggtgccagtgtgaaccagaagatgcccccacactgaggcaggaaggtaaggcagtggagggcgaagggtcccaaactccccaggggccagaaatccagccctatccccatcaagccctcatagagtccaggcagcctggaacggactgggtgggcagtgccctctaacaggcccaggccgagctgccgcaggagaccccccacagggcagcccttggccaggagctgagatgccccaacaccctccccatcccaggccggcgtctcaggcccacagtctggctgggtccctcagcaacaagaagcggcttgagacggtgaggcacccctcaaacaaacacgcctggctttgcctgggaggtggcccccaggggactccgtccccggtctacaagcttttcaggcccccacagagagcagctcccgctgggcccaggctgacaaacccatgcctatcctggaaactcccgggagaccgaggaaccggccccacccttgcaggtgtcagctcccaggaactcgccatctggtatcccccacgcacagctcgcacacagaggccaccatgggcaagggacaaggggggacaacatgccccagagagtgccaggaagggggtctggatggtgcccaagcagggtggcctagaaatggggctagtcctcacgtgttcccaggccaggggtcgccaggccaccaccagggacttcagggagaggaaggcatttctccaactcaactagccaaaggctagtgggacccaagtcactcttgttgccaaagcgagggtcaccacctgttcccagggggtgaaacccccagcatcttctgtggcgaaacagacacatcacagctccggggctgtatttcctgaagcttcagcgtaaaggccttgctgggagcctcagtcaagtgaaagagaaggtgcgctccgaggtcactgctctgcatccagcagacccctgagtaggtgaacgcacttaggtgacaggctggcacgcaggcgagagtctcacctgggccctccatggggtgaggaagccaggagccgggcaccagccctggagaaggctgtggaggcaccgggagcccaccactcacacaggcgacaccctgagggggtgacagccagaggggccccgaggtcccaggagcctcctgccaggctgtgcaggccctgcccaggggccctggcatctggcccggagaagacctttaaaatgggcgagcaccgcagattaagccttctggggccctaagtgtgcagacatccccaggacggcctcctgggaggcaaatcccagaaggcccggctataggaggagactccagccgggtgagtgatgggtgggtgggcagtgggttgtggtgggtggggtggtccttgtcccttttgagggtttcagggaaggtcaccatcacacagatggtgaaacaaagcctaggagagtgagtgtcccaaggcccccccactcacagtaggaggccaggagaagggattagaggccaggagaggccccactgggctgacacctgggctgcccttctacaaggaataccctgcctgagaggagggtcgagaaaaggacgtgccccccaagagctgcctcttccagggggcctgaggggaccagggggtgcaaggctaaagtgccccaggctcccagaagccccgcagggcagcgggctggggccgcacccccgtctccgttgtccggaagcacatcacaacattcctgcatctgtttctactttcagacccagggaaactttacagagcggctgcctggatccccatggtggccgggacatgtgagtgtgtgccggggggggggccccagggctggcgagctgctctgccacatcacaggcaggaccgggagggaggctgctcagagccggcttgggccctgctccgggcctccaaggcaggaagaaggggcgtcctgacgcccatcacccagagaatgaccccccatgcctcccagacagagaccagcaagagggtcagtcccgtccttgcttggggcgcctgtgcccagagccagccaggagcaggggtgccgaagggtgagggtggctgactggctacttactcttcaccccagattcctgggctccagccccctgctcagccctgtgccggttcctagaggcctggcacctcccctgcttccctctaaccctccctccctgcggccacagtccgtgtccgcgacacctcctccagcccattccaatagccaagagaccccgcagaggaagctgagggacagggtcccgcttcttcgtcacccctaccctacctgccacagcccacaccctccaggctccccaagctgggcagggatcacctgggcccacaaagcctggctctgcgggcgaagggtgtcctcacgcagcccctgccctgaccaggcctcctcggccagcgtcccccaccacgtagcacgtgacccaggtctccctcaaatcaaatgtaggggacatcacaaccaggccaggtccctgctgataaccacggcagcttctgttgtagagaatctttaataggatctccacccacgggctcactcccctgtccactgggaggggcctcagcatcacagcggggcttagtgtggctgcagagggtctgcagccagggtcctggggacctggcaacttggcattcagtccttttaccggcctgagcctggggcaaggtgcgggcaggattccatagagccatgctccgcaggaaggagccactgccagagcggcctctgcctctccatgtccacagccaccctctcaggccaggcctgggcacaccccagagggtagggatggctgaagccaggagcccaggcagggtctccaggcgacactcacccaggcaggtcctgctgtcagtgtggagccggaagccgggcttgcactcacagaggtaggagcctggggtgttcacgcaccggtgctggcagccaccgttgtgggttcggcattcgtccacatctgagcaggaatggggaaggatcagcagctgggcacctgtgccctcctgctttgccaacacagccccccaggtgccgggggcccagacccaggtccctcccgtgcctcgagggcaccacccatgagcccctcacccacatctgccggagacgcagcagaagagacagggtctgtgcttccaccttggacacctgctcgagaaggaagagccaccgcctcgagggccggccagaaggtggggagtagcagagggctccaaggacaggctgggcctctagcgcctttcaagactgaaccgggagcgcacgcggttttcttaagtccaaatctacaaagtgcttcctgggcggtgtcaaccgctccaccaggacccacaagcccaaaaagagaaactgacagcttttgagacggccatgcccaggctgtggggggaagcctgagaaaggggagggcgtgctggcttcaagagtgtccccgcagttcatggccatctggagccttccagtgaggccttgtctggaaacagggtcttggcagctgtcctaagttcaggctcgagatgagattgttccggatgagggtgagccctaaatccaatgcgcctatcccaacaagagacacacagagagggccatgtggagaccaggcagattgtggtgacgaggctacgggctaaggacggccagaaggaagaggccaggaaggtcctctctatgggttcatagggagcgtggccccgcggacaccttgggttcagaatcctggcctccagatggcgacagaagaaacttctatagtttgtagccaccccgtttgcggtgtttgttccagcagccctgggaaaccaatgcagctggggtcagcctgggccccccacacccacaggctccccgtgcaaggacccagaaggccaccatatcccaggacagaagccttcgctgtgccggcaccctcccccatgaagtgccacccgccatcccagagcagcccagaccccgtcagaccctccctgcccaagggccagcttggtttagaaccacgtgtcctcaggttccagacttagctgatgccccactcaaaggcggtagaggggagtaggagagcaggaaggggtcgagagcagcctggtcctgaggcctctccccgcatctgcgctgcctggacttccacagcctggggaccagccaagggggcagagcagcagtccaaggccacagacacctcgcaggacccttgtccctcccactgcttaccaagccccctgaacaagcgtggctgaagagagcagggagggatccaagggcaggtccacttttgagaggacgcctcccatcacaggacacctgggcctacctgctcctgtccccagccccgtggcacaggccacagggaaagtgctggctggaagcccagaggcccagcaggacccccgggatgcaccatgagctgagagccggtggtgctccaggcatccttcccctgagaccctgccagggctggagacccagggggctgcacccaggcccatcaccaccctctgcaggaacgcagcgggaaagcacagatgtgcagatggcttcgggctgcccagcctctcatgccaccctccaggcccccctcgccaagctgggcctcgggggaatccaggcagcgatcgaggcaaacagaacagagcagacaggcaggaggccacaggcttcctggacacctgtgtgtgcagcccctgggctaacctgggtcagaagccctgcagctgctgggcccctgccagctggccagagcacccggcacacaggggctctcagaggagaagccagtggtggggacagacggagctgtgcagcctcagcactgcccagagaacacgccatgacccccaccagagagacttccagaagcactccaggaggactctcctaggggtccggggcctctgggcatggcggaagctttggaagtgccagtagtgccccggccagagaggccaaggctaacatgagggagagaccacacgggccacatggacaacatagaccaactataggaggtgccaggagaggagggcaagagcccggtacccaggccagggcagacatgggcattgccccagccaccgcagtccacgcctgctactcaggccaggtgacacctatttttttttttttttttttgagacagtctcgctctgtcgcccaggctggagtgcaatggtgcaacctcggctcattgcaacctccacctcccaggttcaagcggttctccctgcctcagcctccttagtagctgggattacaggcacccgccaccacgctcggctaatttttgtatttttaatagagacagggtttcgccatgttggccaggctggtctccaactcctgacctcaggtgatccacccgccttggcctcccaaagtgccgagattacaggcctgagccaccgtgcccagcccaggtgacaccttttatccgacaacctcacccaccctgcagccgggttcacagatctgaagggagggaggggccgctgagagccgccaaagagtcaccatggggagaaagatacacaggtgctcttccaaaagctatgagccgagcatctggggccctctggccagggtgacaatggaggccccgcctgctgaccttgcctcgagagggaaggcaacatttagctcaaaatgccaccagcagactcccactgggcttggcctctctgggagaaaatattatgatttcaaaagacaagtcctcgaccgtgtgggaaacatggctggcctgatccctcgcttccaggggctgcatagagccaaggtctccctaattctgcttaacaatcgccaggtccatgatcggctgtgaccaccaaggccttcccaccaccctccggttcccacccacggtccctgtgaaaatgcccaccttccaggctccatcctaaaactctggcgtcagagcactgttgacaggtgcaagcggccagcgccagcacacaccaagaagctcttcatagctgtctccaagcctgagtcaacggatggtacccacccaccaggctgtgcctgccacctatggaaaccctgctgcccatccacgctctgagaatgtgcctgcaacccagagatgacacgaacagccccaggaggccagggtctctgcctgggacctccagggccatctactggaggcacaagacacacccactctggggagaccccgagggtccctaagccctgaggctgcctcccagagggggctgcaaatgagaccaggagcccctctccacctgcaccatgaagtcgccaccacaaccttcacaaaggccaggatggtttgcgggaagatgctggaaagcaaagggttaacgggcccccaacagcgccccaaagaagctggagggacagagggacctggtgccctccaatgagagtcagctgggggcagactcatgcccactgggcagggcagtgtgggtggcacccacctgaagggctcaggaaggagaccctttccccctgagctcagatccctccatccaagacccccgagagggtctctgaaaagtaacgatgtaagtgtcctcctgctacgtggacaggaacgctgggactccagcatcccagccgggttcggctccacctctctcagccactagtccctccagaaattccacgctccctctgaaaatgcacaggcccaggtcggctaggccaagcccttctcaccccagcagcaccatctggcagtggcagggggctgtggtgggggagacagggcctgggtgggggtgctgaagcgcacccaggcttccggtgcctgctatttgctgtcagccaggatcagcttctggacacagcgagccagctcaagggtgaaggatttggggcctcccacttggacgacagaggcctacagggacaggcactgggccagacaacctcctgctggggtcccctccactctgagatctcagcccctttgaactgagcaaatccccttaatagaaatgattttcactcagaaagcaaggtaggaacgcgtcacccaaaccctctctgccccactcccaaggcaccccacgtgatggcagggctgagctattcccagacggctccaaggaccccgcaggtgctgagccggtgaccctggctgcggctgtgatctgaagagccgtaggcgcagtggcctttcaggacaatgtggtcagctgaataacgaatgtcccccagacatgtccacatcctcatccacagaccctcatatggcagagggacctacctttgcagatgggactgagttgaggatctggatgggaggttatcctggcatatccaggtgggcccaacatgatcacagggtccttataagagggaggcaggagggtcagagggcggggaggaggagatgtgagcgtggaagcagaggtcggagggaggcagggattggcaggtgctgtgctataggctttgaggatggaggaggggccacaagaccaggaatgcaggcggcctctataaagctgaaaggggcaagagacagactgtcccctagagcctccagaaggagcacagccctgcccacgccttgattttagcccactttggactgggcctcgcaggactgtcaggtaataaatccgtgctgtcctaagtgctgagtgtgtggttatttgttaccgcacccacggggcacaactgcagaagataccactgtcgtctcaggagtcacagacactcggaccatctgggctggaaatcggggctcccagtgccagctctgccagaccggccccccgactcctgtgcctctgtggggctggtcacacagccaggttcacgggagccgcgtgccctgcagaagcttgctccctgggttccctcctttgcagacctgtgatccaggaccatcccgtgctgcctacacacagaccatgctgcccactgagccctgtagtgggaccagggcccccaggaagcactggcccccgagactcagaggccagtgtgggggcctgagcctgaggttagcggggccccagcaaaggccgaaaggagcttggaggcccctatgagtcaggcgacaaaacctgctcattccagggacaacggcccaccctggaggcaaatccactgtccctgtccagccccaggccaagccccacacggggcagggggcaggccagagaggccccagacagctgcgacatgaacctggggggagccatctggtgagagacgagtgggctcagagagcggctattttaaggaacagctgggccaggatcctgctgctgccctcggctagatacgagactatggactttggcagcctcacaagagaactgtcagcacactggcacacagcgacacggctgtgccaacacgggctggttcaccaggagcctggcgagacctgcagtgtctaccaggctgggaggtggaggagcctcagggagcccatggggcccccagcgaccaccacccacgtcccacagctcccagcccaggactacacaggcaggtggacaggcatggctgggctgcctcgaaccagctgcctctgcagaaaccacccaagacgcgccccttccgaagcccacctggacttataggaaacttggagggctctgggcccctgccagaaagctccgctcagggcagttatcaagttccaagccctgctttgtccccacacttgccacggggtcctcacccccagggagcacacaccattacctatgggcccttctcctctctcccccaaaagctggagcacgctttagaccaggacaggggctcccagctcccgagcgcccagcgacacccagccagaggccttggatgcttcgcagtcgcaaggcatttagtggcactgtgggtggacctggccttggctgagccgcccagccggaaggctgcctacccagcgaagatggagcctgggctgccctaggccaagtgaccaagccagggaatgaaggaagcctttgccacactgagggcgtggtgcttagtccttcacgcaggagagaggcagaagctcggcctggcactcgaaacagctaaggaggggtgacgtctctaaggagccatttcagggccccccgccagccactgcctacccccgggtgatgcggctgacgactcactgggagccgcaaaccccacactccctcctccaattccaccccctcctccaattcccgagggtgcccagctccaagctctgtggatcccagggagttcaaagcaaccacctggagggaggcgggcctagtgcaggcgccagatcccagctgcagagagaggcaggacggaacgagagcagggctgtaacctgcttcccaggccaccagggttctcagctgcccatgcctgtggggctccaggaagaacggcacctgccacatccacagacaggaccccaaaggggctgagctctggagaccccggagactcagctccgggggtctcaaagggcctttgtctccagcctgccttttcacttgacccgcagagtcgccagtgccatggggagcggggaaccctgctcccacagacaaagtcaggggatgtttttctttcctccggtcaagggacctggctgttagtagcctctgccgacagccctgagaggggacgggggtgaccgactcctcagcgcccacggaccctgtcccagaagcaggcgcgcctgccgggcactgccccgccctgctccctccagcctagcaggcagcgccctggcgcaaactttaaaaacaggaaacaaagggagcgcgccggggagcgccctggccccgcccgccctgcccaggctcgcccggcgcccacctggcctctggtcaccggcgctcacggggtagccggcctggcccaggtgacatgggtagcagcccctccagaggtagcggtagtgcgtgcccgcgacgcgcgccaggccccccaggagcccaaggcaccagagcgcggccagcccgcggtcccgggacgcccccatggcctggtaggccggcgggcgggagggggcgaggaccaaccgcgctgcgccctaagccggcggccgggcgacggggcaggcggctcgggctggttctgggttccgggcgggcgcgcaatcccagccccgggatccgctccgctcggcgccgcccgggagccgctctgggccgggcgcgccccgcccctcgcctttaagttctcagctttccctccgccccgcaggtaaaggccaagtccgcagacaaccgagggagccgcccccggccccgccccgagccccgccccacctcccccagggggccgcgccggcccgcccgccccgcgcattccagcgtgcgcgctcccggacccggacgcagatagggacctaggcacaaacgcagacatccacatgtgacccacagacacaggcacacagactcacgtgtgcaaacatgcacacaggaggtacacagacacgcacggacatacgcacaggcacacacatgcacaaacatgtgtgttcttggagccaacacggaaaagaagccaaagcagcaaagggagccgtcctggccgggccgcggggcgggggaggggggccgcggggcgggggaggggggcctgcagaggcggctggtggggctgaactctgacaagggtggggaagatggggaactggtttgaagctgcagcaccgatgtggaaacatgggctgagacacccccagtccccacgtccagtgcctgcactgtcctgtcctcccctggcccagggccccatacttggagggagcctgggcgagggaaagctggcatccctgcagcaggtggtgacggacagagagcagggagaacttgcctgcagggtggccagcagtgcccaggtgtcaggctgcaaaggccacggaggtgcttccaaccccagagccctgggtccccacgctcctcgagggcatagcccgggggaggcagtcctcccagggtcggcagcagaaggaaccacagattagagcctcgtcaagcacttaacctctgcaggagagccagggctgtgattccggcttggatcagagtccccagagccccccatcctctctgagccccttctcgcacctatccttggtcgggggtcactgggctcccactcctagcctccatggagatggaagagctgtgaccagcaagctgtggtgctcaatgaccctcagcagtgatccctgcctgggaccagcccagcaccacctccagcactggcggtgagggtccacagaaggactgggcgcccgcccacactgttcccggcctttccaggaaggcccgaaaatctccctccgaaatgcagtggaagtgtccctggagctcagcctgttcccagagatgcagcctgtgtctcctcccagaggacaataggtgagcggtgggcacaaagccacatgactggggccactgcagagacagaaagcttggggataccttccagctgtcaggaaggaggagggtgcatgctccctgggccagcaggccctgtatgtgggcaagcctaggtcaggagcatagccacgggtagagctgtggggaagaaggactgccaacctcagctgcggccgctgtgccaggccctgggttctggggatgcagtgccatcctcaccattccctgcaggggagggctactgtccccattttagaggtgaggaaactgaggcccagacagactaagatgctgtcctcaggtcaaattcaattgagcagaactccagccccggcaactcagggaagcaggcggcccatcccggcagagcctccaccttctctccactctccactacagccaggggcccacctgctggccgagacccacccctcagaagcctgcccagtgctaagatgtggcagagacagtctctgctgatccagggcacctgggagcaagggctgaggggccatccttgagcgcgtgggaaagaagaggccccacccagtcccagcctgtctcaccttgccccgtcctgtctgccatccagaggccagcccgcccccttggcccccaacactctgcagaaatgggcctgcctgggccctgcctgtctgcggggcctcctggggagcccctcccatcagcctctgagcccttgccatgaggagcctctaaatcgcacggatagacaggctgacgggcctgtttgaaggcaccttccacgcagggcaacatcatttatgaccgtaatgtgcaactcattgccaacaactcaccagttagtgccaacagaagctcgagggtcccgccctccgcagccacagcccaacagggcctcagcccagcagtttccatggaggtaggggccaggcttgagaggggtgcaggggaagacaccagaggccaggcctgcaagggcacgggctgcggaggcagcatccatcctccaggaggtgcacgaccggccaccctgcgagcgagctctctctggtctctgtccctctccgcctgctacaggatggggcccagtactcggcgggagcctgggcaacagaatccctgcacctccgactccagtcaccctcaccaacaggcgacggggctggggtcctccatcagcaccccatctggggaaggttcctcaagaggcccttccttgaagggatgctgtctcccagctcaggcaggccccactctgacaccctccaggctccggggtcttgggaggaggaagaagcccacaggaagcaggaggcaccagccgcaccctcaggatcccatgctgtcccccaagtcttgcccaccctgggaaagggctcctgcctcgtgctgtctcgaggaggagggaggagcccaggagccgctgcgcgaggccccaagcagggaaggtcaggcactcggagtctacggccagccggagcccacaagccccaaaggccaccgagccatgcaccgtggcttgtcccagtggacctgcgtgctagcgtcacacatgtcaccttctcagtcagtatgttcttagcaagaaagaatagaagagaactacccagtgagccatttttatatggactgcaatgctgaaaaggatcatatttgcacctattatgttaaataaaatatactattaaaatcaatttcacctatttgtttttgcttttctgacgtggccctgagaaactgtgagacagcatgtatggcttgcgtgtgtggctcacattctgtttctgttggacagccccagctttgctagtaagaactgaggccccaggcgagctgtggaaacactctgtgcctcagtttccccatctgtaacactagcacctccctcctgtgggaaaggcgcttgactgaggatccataaaagtcaacaaacgtgggagtgggaggccgagtctggaggcctgaccatgccccttcccggccctttgctccagcagacaccccaaggccacgcagagacccatggcagagacagtgtccagagctgattcccagagggcgggggacgtcctgggaactgtccacctcctaagccatggtggacacagccatggtccggagacatcctggaagccagccagggaccggagccctggccctctcccttgatagccatcacctccatacccccacctcagcaccccaccagagccatctgggggccaccactccagcccctccattccccttggggctgccatcaccccttccattcatctggactccaaatcccgcgtccatccagggtgagggctgggctaccacagcccgtgtgcccagtacccagtgcaggactggggccacagaggcagctcctggcccactgaagggctgtatggcatggccacatcccggggcatctctggcctcagtttcctcatctgtgcatgggcagaggcctgaatgagaccagctcaggggccctgaagcaatgagacacatgactcgggaaggagaaccagggccaggtgtgtcaccgcgacggtgcccgtgggatccaggcagaggagggcagccaacagagcagggcgagcctccagggaacagctgtcacagcgcagcgaggccttcgggaagcttcctgacaacaagttcaggcaaaggaaattgtcttttctgccccaaaacccccaagagctatgggagcctcctggtatcacatccccatctcaccctcagggtcactcacatcagacaccctcatctgacaggcagcagggaggctgcccctctccagaaggctgcccctctccagaaggctgcatccaaccctctggtcctccacacagaccaccctggccctacacaggctcctcctatcccgtagccgggagtcccccgcttctgctcctctcctcctcatctgctgccccatgcccacccgcccacctcccctctgccctcacatacaggccatgattaaaccctcattctgcccagctggaaccccagtgtgggggccccccagcggccctgggtcctgccttctgcccacggctcctgggacattctcctggggtttcgctaagccagtttccagaggagaaatgacttccccagggtcatgcagggaagagaagtgcggcccaggggaaccaggtctgactctcccccaaatcctgtcctcactgggccacctccttcgggttcctccaggggaatggctcgggcaggcacccacaggcgcccctctggttgggcacagggtctctcctgctcatcaccctccccaggccatggcaggcgccaggcagactgtcgggcagggctcagtgctgcaactctccaagggggcatccctggggcctggacaaagagtttctaggcagctccggcttcgcaccctggctctggccgtcctctggtggcctcggcttccctgaacgagccttccctggcagtctagacactcacccttcctcccgcccaacagaccatgacctccgatgcatccttcaaagacaccaactcagaggtcacctctgcaaagcctccccagctggccggcccaccctaggctggacccccctacccctgcccaccctcctctacgacaccccttcattggctcattcatttagttttttatgcaacaacgatgtgtgtgcccaccacaggcaggacatggctctggggtacgggggcatcgccccacccaactgagacgtccgtccaggtccccacaacctggaagagctggagtataaatgagccccagctgaagctctggggtgcggagggctctgggccgtccctcctgctaggctagggaggagcccgggcgtggccgtggggggcagcagcccaccggtagagagcgcctcccaggcccaggctgcacccacaacaccccctcccctactcagtgccgccaccgagcacgtcccagccggagaatgtggggtctggaagctgtttgggaaatgctttcctgatgtggaaacgcagccggcgtctgtgcctgggaatgtgtgtgtgtcagcagaaggctctcccagcccccagcggctggctccagcttctcccctctccaagctgggcggccaccaggctcctgccaggacccaggccagatcgagggccagtgccacccccaaatgtcactgctcccccttggggctgggccctgactccggaacttcaggcaaaaccagagcctggaagtggacgaggtccagccaacacccccaactgctgtgtgtgtctgtccctcagtgctcacctccgacacccgctccacaaggcccccctccagccttgcggctcaggcgcctggacacgtgcctctacctccctgagagggagatgatgccgggctgtccacgctgccctggcctctgaatgcagagctagtgttgggcgaagctgggctgggtgtgggagccagagaggctgtgggcatagtgggggctgccttcacccaggttcctaggggctcaggcatggggtgagggggctgccagtggggcccaagggggccaaggccccaggcagcccagtgcccagcccagtctacctcctcagcgggcaatctcccacctagccaggcccctggggatggcatcacagacccagcacctggcatgaaacagggggaaggagctaagcccttggctggtggcggggggttgagggtatgagagaaaggagtgacactcagagaagctaccgggagccacggcccatagtcctgaccgaggtggccatgttgcagggagaaggttacaggcccagcaggcacccaggtggagcggcgatcaccaccgcccacaactacctgtgtgtgctctgtgtgccaggccaggggtgctcctaggtgggcagatggaccctgaacgagtggccggggggcaccgggccctgggctctgccctcacggacacctgcagctcactcttccccgctcccacggaaggcgggagaaggcgggtgtggccacatgagcagagggcacaggcatcacttccggccatgacatttaaaagcaagtgtgagattcttggtcctctcatcccacccctgccctgggcacacgcattggtaaggggacctggcctggggtctggatgggatgatggggtgggccatggacactggaaggtaagggcgtgtcccccgcaaaagtgctggtccatgcacaggtggagaccatcccagctaatgcagggagagggtggagatgggtggcctgggaggggctgggaccaggcttggagtgggggaaaggagccacccagagcagcaaggggcacagggctgcaaggacagggcagtggtcagtgtgcacctgctggcccccactgcagacagcatggcccagaaggtactagaaggaggccactctcaagcttctctttaatctgccttcgtgggctcaaggctcctaagccccaaagccatcccatgccaccccgcccctgcaagtggcacgtggatctgcctggcggtttccaaccgttgacctccagagcccagcccagagcaggaggtccatttgtggtctggggtctcacacagtccaagctgcctccctgcggagacagagcagaccggcctccccagcgttcctcgcaccccttctcccactgtcgccaccacagagcttctatcaggagcagggggggcccccacccggcctcagagcacacagggcctggcaggggcctccccgaaccattccaatgtcagcctcatggtaaacccattaccctgtctccactcctcgcccaagccaaaggaaggaaaattgaaaccaccgctgtttccgcgagcccagctgccattcctgactgcagctgtccctggctggggccaggcagaaacaggggggagcccccttctcttgtacacaccagcccccaggtgagcccacgatggagtggtcctgtctcctggctctgagggaggcatcagactcccagagcagcccccgagagcctgaggcctggtctgtccccgtgaggctctgctgccggccagcagagcatgtgcctgtgtgtgtgtgtgtgtgtgtgtgtgtgtgtgtgtgtgtgtgtgtgtgtccgcgctgtctgtgggttctctgttaccaggctctttcccacccagctgtgcgaggcccgggggcacctgagccctcgagggctgacacagcacccgctggggatgtagcccccaggcaaggccagccccacgccccggggcccagactcttgctgggacatcagagctgccaggggagcggagaatgcagacaggcaagaggatgccccaggtctcacactgtactcagaggagtgatccgggaggcttcctggaggaggtggcactcagctggcctttggacatgacattttcagggacatgaacaggcctcagtggggtcaagagcccagtaggatcccagggggtgaggggtagaggatcagggaaaggcctgggccgaatccagtgatcaagggtgccctggggaagagatggggcgtggtggggaggcggcccagggcaccgggtctaaggtgcagtgtcactacagacccaaggcccagagatgagcaggggccagggacacaggcagcagcggcctcccatcaggaggctggcccccggacagaaaggccaggcagggccagcagagatgcatgggggaggggccggggtggctgtgggagataaaagtagagggaacacgacgggagagggggaggctcagggggctcagcgggtctctccttcctaggaacacggccccacctgcacacgcctggctcagcacctcggccctgccaggagggaatggtgggttccactcttaggaggcacagggggaacgtgacttggcccgggtcatgcaggaggcacctgccctcccgaggcatccgcagttctgagagttcacagcccctgactctggggcacaatcgccccaacctcctcatgagtagcccctgggaaaccaagctggggccactggggcttccgggaggactggagaaaagtggctacctgggcgcctcggtttccccagcccaggaggcccttggcttggtgacagaagcttctaggacaagggcaaggccttgcctgaagcatccactggtcaccttcccaggcccaggcttatcttcccaacagatggctcccgggccaggccagggtcccagggtgcgctgagctttgccatgtgaaggtgtccactgagcctccccaagctccaagtctgaggactgcagcctgcgagagttacgcaggcccccggggtcgcacctgtccagcatcgaggctgggatccaaacccaggccttctgggctgctgcctaaacccaccagcccttcagccctccgtgtttatctggagcacggccacagatgcctgcaggctgcccagctcggggtgtcctccaggaaactgccccagcgtcctggttctaggcagtcagagaaagcctcttgtctttctgttgctgggctggctctcaccgctgacgctgaaggctattattttcccggcttggccttaactgagaacgtgcctgccagggtgtgctcattagagtcggaaatgaaagcttttcactcgcagcgcctcggacggagcaggcctctgaccacagacgccctgtcggaaatgctgccatcctgcctggaaggaacacaccttgcagccgggtttcccgctgcactgggaagacagccagctgaagaatgttggcctggggaggcccagattcagccacccacaggaacgtggccccagctttgcaaccggaaggcccaggttcaggcctgggctccagggcccatgggcgagggatgctgaggcctcaccacacctccatctctttccctgcgagggcagccttccccacagctgtgtttgcttgttcactcctgctgctcctacaggacgccttagtctgggtaatttacaaacccctggatgtatgtcttacagctccagaggctgggaagtccaagatccaggcacggcagaccagccctctggatcctccagggcagcttctcagggcagcttcacagggcagaaagggaaccactccctccgatcttttctggggcagtcatcccattccccacggcagagccttcctggcctcctcactgcctacgaggccccacctcttcacaccatcacactggggagtccactcgaacgcaggaattttgcagggacaccgacattcaggtcgcggcaccagatgtttgtggaatacccactaagggctgggcgcttctggcatggggactgggaatgagtaagaagcctcttccacatccagagaagccaccagctagaaaggggagatggcatcctggggccaaacagtcagcagcccaggtgtcagggcggggtggggccaggcgcaggctggggccctggacttcaaagggctctgggcacctgtcccctctgccaccctccagctctgactccgcaaatgctcctgcgccctctgggcctcttgctccattctctaaatcccccatggcactgccccgtggggggcctcagcactgagcgtcacagagcggggctgccgcccaggcttggcatggagtgtgggtcgcacagggcttgcggaggctttcggccaccatgaccactcttccggttcagcaagagcacatcgtcccaggaagcaacaaagtcctggaagcattaaagcctccccaggagactcccgtggaaatgccgttctcctgggtggaggccctgccatgggtgggacaaagtgttgctcccacaggaaggtcagagaaaaagctccagcaccaaggggctcatggagtgcaggcggacatgcgggcacctggcctgggtgccaggaccagggtccaaatcaggcccccttgcccactcgtttctcccgtgcctgggctccgcgggagaggcacagctggcccgaggggggcagccggtcagcgcccaggcttcctagcccgcagccctcggtcacttcccacatgccttcctctccctggggacagtgggaacctggcagtgccctcaggcagcaggcaagggtgtgaaaggccgagcccacagtggcagcagagagtgggcggggatgggtgggaagggcagagcgacagactcccgggcacaggggctccctgggggcaccgtggggggagtctctggtggtccctgctaccctgagctcacccccttacagcaggtccctttgctcttgagaagggtggcatcccacagagcccacccgcgtcccacagacactccgatgaaaacccagctccaccctggaagcccccgcggccaagtagcagctgagagccgggtccggcaccgagaaggaagagctgccacttccaccagagaaggcgcctgcttccgcccagacccggcctggccgcctcccccaacccccggctgccccgtttcccgtgatccgtccttatctcctggaaggaggggtcagccggggtgggagcagcacagtgtcggggctgaatccagccccagtgtgggaaggcagccctcgggcctggatgggtggggtccacccggccctggaggccaaaggcagcactgcttcctccttctgaacagcacagaacacctctccccattacattgtcactgtggtcttccagccaaaccatgggcttaatgcgagggttggacccattttataggtgggaatgttcacaggactgaactccaacccggctggcagtggagggaggaagctgggcttgcatggacacctgccaggggtccccaggcctggatgtagggtcctggccgccccccactcagcctgatgtgggatcctggtccccgaggaccatggtcaagaggaggcagaggaaggcaggtggagagagtggggagcccaggccgaggggaagatgggccacacgagtggggcagctctcctctctgtccggggtttctctgcagcccgggccgtgggccccgagcattttccccaaaacctctagattgctgtaagggctgagagcaggacttgccgcatcttacagagagagactggagttcagagtggcagagctactcgcccaagaccacgcaataaggagctaagggaagttcaaacctggccctcgctgacaccaacggctggttctgtggtggcatcctcaaagtggcttccctggaaggcctgggccatcctggaggtgagctcggggccaggcagcccgggcaggagctctacagaggagcctgaattcctccccagggcctgccagctctggcacgcacaggcctgagcccacctgcccaggggcctgggaggagggtgggcacatgtcagaggccgtgccctgcccaggaaatggcagaagcagtggcaggcacccagcctcccctgggagatgagcccactccggactgcccagcccagcagagcagagctcagctcctgccccaggccagtctcccagaacatgacaaacacactggcctggagacgctcccagggccggggcaccctgaggccagtctcctgtgccagcactcactcagagcttgatggggccgagtcatcactgcaagcaggttccgggcccaccccatcaacttggcacacactgccctgccaggggtccccaggccctgcgggtgaccaagcaacgcggcccttccctgctctgagcagcccgaaccctgcgttcgtgctcactctcggctgccggcaccccctgagccatgcgctcactcactcgctcggcaagactacatttttgggggaggctgggctggcagagggacagagaaaacacagcaggctcctggcctttggcagggccccctcggccacacggtgactcggagccctagccatcccaaacacgcagagctgggggtgagaacccccgggcgggaggcggggcgaggccagggacggggcaggagaggaagcgtcggcactgctgggaggcagagtctgtggcccggtccctggccgagatgccgtctagcctcctggctggccccgggtcatccggtccacgcctctgcctctggccagctctgccagatggcaaagaccttttctgtccatagggacccctggcagagagattccaacacctcctgaagggatacgggtcgaggcccgggcctaatgtgtttgccgtcaccatgctgggctctgcagtgtctgtcatggagttgacattccagaggcacaccacctgccgtgcctggacgcccagcccgcgtcagccctggaggggcataaacacggccggcagccccagagcacgaatcaggagacccccggctctggccatgggcagtgggaagcccattcaccacccggagccgctctatcgcgggagagcctctgcgcgccgcaccactcgctgacacaggaggcgggagtgtggtcagtctgtcttccggggcctgacacacacctgccagggaccccattacagggcccaccaccaccccaggctgagagagacacggaaggtccaagcatcaggctaaccctctccccccagcgtcgcagcggcatcaggctaaccctctccccccagcatcgcagcggcatcaggctaaccctctcccctcagcatcacagcagccagcctgaccaggctctggagcccacagacctgaacaggggctcctggggctgcagggcggcacctgtcccctctgcccccagcaccgtctgcaccctgtaacaggtgctctcaaccccggagcacagcctttgtgcaggggccctcgggggcctctccgttggcttccctgggctggcctgggtcagtggagctcctcctaggagggacccccacgcagcatcctgggtcacctcaagagcctgccctcatgcaggggctgctggaacaggccccgacaccagcagacgctggccagcctggggagtgctccacacaccgcagccctggagcatcgggaacctgccaggcagcccccagcagggtcttgggcctctcactctgctctgcctggtgttcccagccacaggcactgagaccacaccatgccccaccaaggcccggcaccagccctggcctggtagacccagggcttcccacacaccatcgagtggggtttcagaccccacgcagcaactggggagacaagcgggcttgggccggggaacagcggggcagaggagcccatctggagctgggggcagggtggccgagggggcaggtggcactcagggctgggtccaggctgacctcgggaggatgactcgggtcaccggacagtgacccgccctttgctccctaccccagctgggtgagcacccccactttaaaggggggcatatacaaggatcttgggggagaaggaagctgcctgtgtcccatggcttggcggcggggccagccctctccctaggacacacaggcccccaccccatcagttacaacaggggagtttcaggggccggggaaggtgcctgtgtccgctgcgggtcttcgtgctgcctccgcagggactcctagccccagggacaccagcccgagaggggtgcacttcttccccagggttgaggtgaaatcggttcagcacaggccccccagaatgccagagaccaggtaggggggtctggtcttcaccctgacacctcagtccctgccagtgagcagccctgggtgggggctgagtggacccttctgagggactgcacaggcagccgcaggggggaaaatgtaagctgtcccgcgcctcctgcgtcccacctgggacaggctcctcggtgggtcggaacctccagctccaacgtgtggaggtggccaagtcctggggccatcccatacctggagtggacaagggtgggggccctgcaggagagaaggcatagcagctgggcccctcctcatcacgggtctgggagggggttctcctcccctcatcctgcccaactccacctgcacctggctcatcctggagcctctggggctttccgccaccccagtggagcccctttcacagaaaccaaggcaagagccagaatggagcgggggtccgggagctggcggggactgtgccacaggtggagccatcctccctcctcactgagccggggctcccaagcctcccaggctccgcgggtcacagaagcttctcccctcccccagcctcccgctggccacaagcacaggctggagaggagcacacagaatctgtttctagaacatcccagacagagcagatgcccctcccacctcccctgaccccaagtccagcaggctggcccctgcccccctccaaacggctcgcagctggacagctggagacagcgttgcgtttggcaagggaagttctgggagatgatgacagtaagtgtctgaccgggacagcagagcagaggcctgaggactctcccaggggccaggctgcccagatccaccccagggtcagatgccagggcagaggctggagcaggcaaaggagtgtgagtgggagatggggacagcttggggcccccactgccaccctcctcggcctcctcccccacctcaatcctaatctgttctcatctctcccagtgggttttccttctgtctgtccttgactttgctgccagcctgccagccatggtggggctgagctacagggtctgcttagagctcgcaaacgcttctagccccaggtcttgcctgagccatccctgcccgcccctccttcctcctgcatggcccccaaggtgcctcccaccaacaccaggtcctctgagtccccacagaggcaatgtcaggagtggggagcgagttgggtgaggagtaccccgagtggagcccttggagcagcctgtgggccaggaaggagggtgccagggagggcaccgaggcggggtggcagtgggctgggaagggggctgccagggaggccgctgaggcggggtggcagtgggctgggaaggagggtgccagggaggccgaggtggggtggcaatgggctgggaagggggctgccagggaggccgaggtggggtggcagtgggctgggaagggggctgccaaggaggacgccaaggcggggtggcagcgggctgggaaggagggtgccagggaggccaccatggcggggtggcaatggcctgggaagggggctgccagggaggccgaggtggggtggcagtgggctgggaagggggcgccagggaggccgccaaggcagggtggcagtgggctgggaagggggctgccaggcggggtggcagtgggctgggaagggggctgccaggcggggtggcagtgggctgggaagggaggccgaggcagggtggcagtgggctgggccatgccctaccttggcaagtctcgccatcaccctgcagctggtggctgggggggggccagcggcagtagaagccccccacggtgtcccggcaccgacccgcacagcccccgttggcgttggcacactcacccacatctgcgaggggagaagcaggtgaggtgccagccacgcggccacctcctccctccagcctcggcccacccgaggcctcagagggatgaggctcagggctccccacagcacaggggacattgtccaccagaacaggccccgcaggagggaggctgggtgtggaaacccagcagcaggggagccgcactgcagaacgggtccctccctcgctcccagggaaggtggcctctccccgggccttcagtgtggtgtggctctcaggagcaacatttgggtatagcttggcagaggaggtggccctgctcccgtaaagcagccacaccctttttgtgagtccccagagatcggctgccgtgtgtgttccggtcaagcggtctgccacagctgtgggttttcaggaaaaacccggcttcccttggctctgaggccaggaggagtttcactgtcacctgcacagccactccccctcccgccttcggacagccccaggccccatcctcccttcctggcgcgtctctggggatcacgtggcatctgagttgggcctggagagcaggttaggagccctgaacaccacatcaagttgctgagcccagcctgccaggacccagagcccatgccctagcccgccctccgtctttgcgggtgcgggaatgtggcagttctcccggggtgcgcctctgcctggttcaggcagcaggacttcccccgggacttggtcctgggcagaggcagcgtcactgcctccccacacaagtgactgggctggtaggagcatcgagggaagaagggaatcaagtgacctgccttgagaaggtgtgggacccaacttgaggtgacgcagggaccaggcgcctctgcccacccacccctgctgaactgcaccatccaaacttccaggaatgttcagccccctgtgcccccgcctctagaggccaaagaccaggccctccccagctgcatggggatcggaacctggaggcaggctcagagccagtggagcccccagcatgctgaggacgcagatggccagacgccagcccagcccacagggtgctgttcccagaagatgaggccgacctttcccaccagcaccccagacagacggaacacagcgcgggcctttccggacctgagctggcccaaagctccccagtgccgggggcatttctctctgcacctcctcaggacgggccctggaagagccccgggcggggccaaaggcctcggggcggccacagtcccatgagaacgggccaagcggaatgcaggccagccgtctccggactgttggaatgcagctgtcagcacagccctgcggaggtccatggtgggaattttttgggaattcctagagagttacacagggcgagacggaggctggccaaggccaggggtcagagccaaggtgcccagggtcccctgtctgcctggccccgacagactgccctggcaggcaagcagcagcccctcctctggtgtggggcaggcacccaagctctgggacctgtcctgacactggggccttgaggccaggtggctgggagggcggtgtccaggcaggtggggctggacgccagatgagcttccacacagctgctggcacagctgggtccccagcttcccaggcctggaacacagctggccatgtgagcacaggtccccagcaccggggcagcctcacagccacccaccccgaccctgctaggctccacggggaaaggagcccactgcagctgggggccttcagggacccccccacacccacaggaaaagccccttagcctggcctggcacaggggctgcagggtctggcactcaggacagccaccgctgcctggtcaccctcactgaggctgcaatcgccccttgttcccccaaagcccccaaccccagcatctccatgctggctgggaccccgccttgggtacctgcgggcgccgcctccaccccaggccgggctgagctctaacatccccgtggctccgcgctgggtgatctgtccccagccagaccatgcaagctctggtggggactggcccccctagtctcggggcccccgtgctcagcccagaacaagcccacaagggccgcaggagacccttggtgaatgctcaagaagctgcaggtggaccggccaccaggagaaaagccagagcccgacaaggcagctggggctcccccaacccctcaggcttgggctggaactctgggcaccacgcagactgatgccccatggccacaggcagaccagggcccaggacggagaagttcagctccagaagcaggtgacggctcctccccaaagccagcagaagcctctctttcctccaaaacccaggaccggggtgttcagggctccagtctaggcgagaagatggggggctgcctgggggcttctgggggcacatggtcatgctcgggtctgggctggctggcggcaggcaccccgttggttgactgcatgcagaagggtccatcaattcaccgaagacactggcatgggatatccagggcgacttggccccgctgctccccacagctcaccccgctctctggccccacaagggctccagctcgggctatgggcgtcacttatggcctggaatttacctaggcaacactgcagcccagggaaccacccggaggctgaccagccttcccgtacaaggtgagtcttgagcaggggcctctcaaagcccagctacgtgggcaccagacaggccccttgctccagcttctcccagggatgatccaagcacaggcacgggtgggcggtcgaaggtcagaaccaggctaggctctgagtcttcacctggagactcacaaaggctgccctcaccacttctcgccagccccaacccaggggtccccgctctccccagagctgaagtgatcgtggatgccacctggtgagtccagcctgaagggtggtgaggggaaggctccatgcccccagccctccccatcccgggaattttctatcagcagaaagtaacggctcccgacacaagacatacccagaggcgccacagacccagcagtcccacccctaagcacctgcccaagataaatagaaacagggactcaaaccacggtgtgtgcacacgctcacagcagacttgtccacagccatcagaaaggggaggccacccgggtgcccaccagcgggtgatgaagacagacatggaggacgacagcgaggaggaacctcaaacctcgtgctgtgtgaaaggagcccatctcgagaggtcacacagtgtaggatagggcgtaccagctggcgggtctggggtctcctgggagggtgaggaaaatgtctcggaatgagataaaggtgatggctgcatagcacgatgaatgcacaaagggtcgctatgtttcaaaggggttattttatgcaatgtgaatttcaccttcatttaagaaaaaagagaaaaacgtcatcccaagactggattctgcacctcacttctccagcagttttgatacagaaagaagcggtcgtgcccaggcctccggggtgctccgtgccggatctggccccatgccaggggcctaactcagcagcagtgactgcaatgtcacaagtgcccagcagccacccaaccggggcagggctccgaagacccagcccttgcagccgatccagcaagcacaggctgcagagtgagaacccgaggggagcaagagggggcccacacccccaccgcccgtgcactcaccctgggggagccagtgtcccccgtgtgctagtccattggcaggagaccctaacgggtgtgacagtggggctctcagatcagccgccaggtgtggacagggccaggatccgaggctccagccggccagggctgggcagctgcctgtgtgccttggggcctcggagtgtgaggcaggtgaggaagaagatgtggatcccagctctgagagccgggcccgcgtggccatgtggccaggcagctccccgctagcgatgccagcctcctggcctataccaggccagatgccccacagatgtgaggctgccagacccagcccccgtggtggtgagacaccagaggctccgcttgggggtggccccgccccatgcaggtgacaaagtgtttcctaggatcacacctggggatggagcagctggtgtcagcctgctcctgcgtgcagaccccaggggtctcagccagcatgaatcactctgggagaggctgctggggacgacaggacctaaggggccaaaggggtgggatgtggggagcctccaccaggggaaactctcgccaaattccaagtcaacgggcagcatcaggccctgagccaatccagctccacacatcactctgggcagtgcctcccctgggaccaggcactggccatgtggccaatacaaccccatagcaggctggctggaaaccctccctggccagacacaaggtcaacacagacccaacacatgctcccaggatgcggtccagctcccaccctctcagtggtcacaggctggctctgacttatattgccacagccacaggggacaggagacagcaccccgccaaccctccccacacacccctctgcccagacacaccacactgcaggggagcccgagatgggggagctggatggggggagctggatgggggcatccagaaaccagcagggctgcgacttccatcaggaaaaccagccactcaggtgatcaccctgcccgaggccaccctctgggagcctccggcacttgtaaaacccctgtcacctcccaattcaagcttccacgcagaagcctgagagctgagctccctctggtgcctctgttcgaccaagccttgctgggtgcccaggtgggccgttcagacatcagcaatcccagccccttgaaccacacttgtccccaagtcaacgttaccatcagcccaggcacgggaggggacccctgctctggacacgccaaactgtggctcaactctgggtgcattttctcacccaaccctcaggaccccagcggtggctcccctcaggattgccactccactgacgagcacatagcctccctatgcccgagccccaggcacagaatgcaaacctggccacagaggagccttagcactcaaccccgcccaccagggccagcctcccaggcagggccttctccctgctccaggctgtggggacatggcgagggcaggtgtccaggcccccacaggaacacaagctgcctggggctgcgcctgatgccaggagggcaacaggactggggtctaggacagagccaagaaagcgctgaggcatcctggtaagaccacgcgtggcggctcacgcccgtaatcccagcactctgggaggcccaggccggaggatctattgaggccaggactttgagaccagcctgggcaacatatgagatcccgtctctacaaaaaataacaaattagctaggtgtggtggcgcacgcctgtcatcccagctactcggaggctaaggcaggaggatcgacggcctgagcccgggagttcaaggctgcagtacggtatggtcacaccacggcactccagcctgggtagcaaagcaagattctgtctctaaaaaaagaaaagaaaccctgggaggctcccttggaaatgaggaggccacagcctgccagggtggcttgagggaaagggccgctgtgctcacccaccgggcccagaccccccacttttctctgcagccaccttgccctccaagcccagctgggtcttccagtcccccaccaggtaagcctgctgcttcatcccgaggccccaccagtggacagatcagatgctgctgcccaggtccccctcagagttcaggctcagtccaaggcccagggcccggccaggccccaaggacatcttgagaggtgcccagcccctaatcccctccagacagacctagctgccactagggctggtggccaggggcctcaaaggtaacgcacagccctgttctgagggtacagggaggccccaagctccgcctaactaccagggccttggagccaggctgccccatcacaagccccgccccccactgaccccccaaatcctcttccttccctccctggctccagcctgaggatggggatccacggccgatcggctttcccaccaggggcccagcctgcccagctccccccaccccagggtactccgggtaccctgtgagcctggcgcctccagcaggacccccgctgcctacccctgggcgtgctgggtcttttcctgagagtcttcaggaacaggcgggacggggacacaggcaagagaccctcccgccccccaccagccccaggaggaagagctgacgaggagggggagcctcaccatgcaggatagaggctggagccacgggagagaggcctccccacaccccaggcaggggagctgtcctcagagatggtgatccctgagccaagtccgcccactgggcctcaggctatggcaggagcaggatttacgaggccctgcctgcccgggaggccacgaatcttcccagcctgcagtactggtgtcacccaggcaggtcagggctggtcccaaaacctcagccaggagcactgacgaaaaccagctggcccggagtccaccacgagtggctccagaggagaggcagggcagcggcaggcatcgggggcttcacagggggccctgcactggaaagtcaccccttcaggaggggtgggcagcctctcaccccgctgtgcctcagaggtccaacttctgggaacaggtgggcccgggagcaccccgttggccagcacaccagaaagtgccgacgtgggtgggtggcacggctggggcctgcctggtcttcctccccaggaatgttctgcctggaacccagctgctcccctccgccaacacctcaggggcagggacaagcggggggccctgtgcgagcttgctctgtggggcccacatgcctcctggtgtcctgtggggaacaagcttggcgcctgcttccagaacgcctgcttggggtggggaagagcacatgcgccccatcccgcccccggcagccaccgtgacccccttgccatgcaccctgctgcatgccgtgggcaggggcactaagacgacacctcaggaggagacggtgaggactctgggttccaacactgggctgggagcatcaaccagcgccccgaccaggcggctccgagagagtgtcgctgggggatggcaggaacactggaaaagccagcggggtctaacaaggggtggggacccagccgggccaggcgggagggggacggcactccaggtgtcccggtgagaggggagggcggcttcagcctgggggaagaggggcaggtaattcacctggagtcaggtaagggccccagggtcccagctgctacaggaggcagctacatccctttcctggggctgatgtaccagagtgtcactaaccaggtggcttaaacaacagaagcctctcttaaagttttagaggccggaagtccaaagtgagaatgactgggccccccaggcaggtgctccagagcctctcccacaactggatcctctcactctagcctctgtctctgaggtccccctgcccctcctctcctgtgccagcctctctccctccatgaggacatgagtgacagcattcagggtccacctgggcaacccagggccaccttcccatctcaaattcctgaaagtgatcacatctacaaagtcgttgccattcaaggtaaaggtcacagttccctgagattaggctgtggacatcgcggggccactattctggaaaccacagtgtggaggctagggccactgatttgggggttggcctcttccagctccctcagggaaaagacagggcggctggcaggggagtgggacaagggctgatcccaggtcctgcccggccctctcccgtcctggaacccagccacaccctcttgtccagggcaatgggagaaagcaggaaagaccaaagcctggatcccaccaggccaacaccccacgcacggggcctgctggccggagagaagcacaggtggtccccaccacccacccacccacccacccagggctatggatcagggccgagaaggggcctcttctgcccaaaaagacagcaagcaggaggagctgggcacgaagagggtgtgagctgcaggaggcctctccctgcgcctccacccacgctcagctggaagccaggtgcccaaaggcagggcagaggccctgagggccaggttccaggctggcatggcctcaggccgctgggtgtggctgacccccaagccgctctgggcctccaccacccatgtccagacgagacaggaaagtacaggcaggatgagagccggggcaaggcgactcctgtaagcactgagggcgccgtgtttaatgtgggcggctcagaaatgaaagcaggagacggcagagctcctggggtctggcctgcggcccccatcctccacgactagaaccaagacccctgtggttctcatggctgcaaagggggccccagggagctgaacccgtcagtgaaacagcaggagcctgcagggccgagaggagccttctccagcccgccctgccccgcagggctgccaggtcaggtgcctgctgccgctcatgccagaagctcctcctggggtctcaggccaagacctggaaagccgggccagcggcggcatccaaaggcaggacttgcccctgcccccaaccaaggaagcgaggtatcctggaagactgagctggcatccttctgagcatctgtccaagaagaaagtgccccaaataagtctccaactcaagctgtcccatcatctctgggggagggactgtggctgcaagtccacctaggactggctacatctcaagtctgcccgcccacccacaggactcacgggatcctggctggccctggaaccagctggagtccgtggccaggggagcccctctccaaggtgggctgggttcagagaccttgggggtgggctccacctgttacagcaggagtggccttccgtggcccaggtgctaagtgaaccacgtccctgttgctgggccaccctgtgagtccatgctctgctccccaagccccgtcaggatttcccaggatggggagtggggcagggtccccatacataacctagagctctgtgtgaggcccgcaggccaggtcagaattaaactccatgatcttggcacaaagacacccccatgagctcccagaggtgacaacgtcacactcattacatgaagtttcatggtaagtggcgcatccaaaaccgccggctggctgaaccaaattggcccgggacctcctcacggagccacagccagcaggggtaggagaaacctcggcaaagcaagagacgccctgggcctcctctcggccgcccaccaggttttctgcctgcttcccactccagtgagtcaggagcgggtcacagaggctgcagcagcggaactacctgcaaatgagaggacagaggacccggtgactgcctgaggccgggacacactggagacgaataggactgaccaccaagcagactgcaggcagcttaagagctccattgtggacaaggggtggcacgtacgttatccttcaaaacaggacactggagagcagaagaggctccagtgaaaacacaaggatgcaggtacttcacgtccctgtcccaaccacacgcgctcacagaccggagaatgttaaaaactgccgagcctgccgggtgaggatggtgaggctgcctcatggtacaggggagccagggctgtggaaagaacgaaggcagcccctcagccgacctgacctaggaagccgatcccggcttatctggggggcctggtggaatcacatggagtttcatgggtgctggggatgcggggaaggcaggagggaaggtcggagtcagagagagaggcaaggacatcgcagcagccaggagagacgggcgctgctgccttggaaggacgaggaaggagccacgagccaaggaacgtgtgagctccccaaaagctggaaaaggcagggagacggcaagactctccctgggtccccagaagggaccagccctgacaagaccttggcgtaagcccagggagacctgagctgggattctaccttctacgactagagatcacagatctgtgctgtttgaagcattacacttctaaccatttgtcatggcagcaaaagaaaaattgaacctttaccatgaaaaacaaacagaacgcagcttcccccgcagagctctgcaggctgctcccggctgcagctgcccttggctcccagggtggcgagggcatcctgcccggccaggctggcctggaggggtcttgaggaggagccactgtctaagcaagcccggcgtccaggctacgtgcccacctcgctgggcggttatctctgcgcctgcagctcagaagccctgccagcctgcggtagccagaacattccaaccccaattcccatcagaccccgccccaccttggcacaggccacagggagccggacacagggcccgctcatccctcgctcactcccacagccagcgctgcggagcaccgagggatgcccagccctggcaaggagagacggggggcccaggaagcaccagcagcagggggagttcaggggataaagtgcagaagggcatatcagggaaggcctcccagaagaagcggcccgtgggcagacgtcgtttgcacaggctcagggaaaaccgtctaatctatgaggcgccgtccgggtgggcacagcagtcaagagggctgggtgtctccacaggctctcaggaaacaaacatcgaaagctcagccctatcgtgagtgttgttgggtggtctgctgtgtaaaggagccacacagagccctctgcataggaagcatgcttccgcggtgcagctggccttcccctccccgctccgtgcagtggttcagccgggccggtggtcacgatctggatgtgctaagttcagagtctccttcagaccctcagcactcactgcctgcaggacacacatcacccagctctcctggtccaatgtcaccgaggtgacagctccaggaactgcctgaccagcttttctcctttctccactctgaggactgtgcagtgccaccgtccctgcctctctcgtcccctcctctctctcccactccaccaactggtcatgcataaatgtacatgtgactgtgtcgacctcctttctaattttcttctaaaactgaacatctaggtctggtgcggtggctcacacctgtaatcccatcattttaggaggccaaggcaggaggatcacttgaggccaggagttcaatatgttgggacaactaaggccctcctcaaagactcaacttcctggtcataagttgtaaggttgtaaatcaaccctacccccttcctgccccgacttccctttttcttgctcgcaagacgtgcgttttccctatttggaaagagtttcgttctaagccaactgggatcagcttaggttgtgcggtccaactgcagccaataggggaaaaacacagaaaccagaactgcgttagggataaaaatcccttcctttctctgttcggtgtgctcttgcgatcgtgatggatgcgagcagcacccttctgccttgctgagaagtgaagttgccttgctgagaaatttttggtctaagtgctggttcttgtttgcagcgctgagcacctgtttctaacaaatactagcctgggcaacacagcaagacaccatctctacaatttttttttaaattggttgggcataatggggtgcctgtggtcccagctactcaggaggctgagggggaggatcacttgagcccaagagttcaaggctgcagtgagccatgattgtgcccctgcactccagcctgggtgacagagtgagaccctgtctcaaaacaaaacaaacaaaaataaaaatgaaaaataaaaccgaatatcttagaagattcttctccatcactcatcccctccctctgcactgggagctctgggagctctgggaggcagctcactctgcaaggtggttggaggaggaaccctgggggcctctgcagtgcactaaggccattcggcatggcagccacttgccccgtccttaaacctcaggccctgagaagtcattccaaaactactaccttccatggggtggttcctcctaatttaggttactggtcttgcaacagaagagcttcctcacaccactaggaacctcgacatttgaccattcaaacatcaacttgcagcccagcaaggtagcacacacctataatcccagtgctttgggaggctgagacaggaggatcatgtgagcccaggagtttgaggctgcagtgagctatgactgtgccaccgcactccaacctggacaaagagctagaccttgtctcttaaaaaaaaaaaaaaaaaaaaaaaaagaagaagtctacttgcaaacacttgtgataatcacacttacaaacccagtggcttgggagtgggacggtgggagtatgaagcccagacactgaaagcgcagagccatcctctgcggaagacacaggaaaggaggcgtctggacatgcaccaagcaagaaagcaccaaaataagcactcgcccggccgggtacggtggctcaagcctgtaatcccaacacttcgggaggccgaggcgggcaaatcacgaggtcaggagttcaagaccagcctggccaacatggtgaaaccccatctctactaaaaatacaaaaaattagctgggcatggtggcaagtgcctataatcccagctactcggggggctgaggcaggagaatggcatgaacccgggaggcggaggttgcagtgagccgagatcacaccatggcactcagcctgggcaacagtatgagagtccgtctcaaaataaaagaaaaaaaaaaaaaaaaaggaaacacgatgagcccatctcctgggagtcgggaggtgctctcagggcaggagagggcctggcaaggttagtcccagagggcaaagaaggctgggctttttttttttcttttaactaatagattttattttttaaagcacttttaggcttatggaaaaactggacagaaagtacagagtttccttctcccaacacacataatttcctgtatcattcaatcctccattggaatgaccgcttggtacagcggacgagcccacgttgacacattgttgttaactgagtccagggttcctttcagggcccactaggggctgtgcattccatggacttggacaagtgtctcatggcctggatccaccattgtaagatcacgcagaggagttcctgccctaaaaatcctctgtgctccgcctattcaccccttcctccctccttcctcacccctggcacctctgctgtctctacggtgtggcctttcccagcagtgtgtggccttggactgctgtcctcactcagcaacttgcattgaggggctgagaggcccccctgttctccaagagaaacgctccataggcagggaaaggctctggggatccggggtcccttcccaggcttgggggaggctgggtgccatcaacccctccccatctgtggtttccagggcaaccctggaaaccaagagtgggtcgcctagaaacggtcagactggccccacccactctggatttccagggtcacccggcagtcccctctggcagccaccggagcagccaggaacagcctcaggcgtcggccgcgagggggttgctgggctggctggtcccccaggtctctacgcgaagggggtgctgggctctacccccaggcctctactaccctctggcacacatccatctagtgccccaggggcttcggagggcaggggtcagctctaggcccttctgtactcccagagccaggcatacaggagtctctgggtcacatgaagctgaaggttctcccccaagtctgccctggtctctggcaggagatgctacaagggtaaaggacccgctggcaggagagacggcctttccaaggggaggcggcacggcaggtcgggtggaggctgcacgcagacctgaggctgatggaagggggagatgcaggctttgagctgagctccaggcaatgggcaagggagggcccctccacgctcagctgaggagcaagggctacggggcactcagagcttcctgtccagccaggagccccctggggacccaagctggagagggactcaggcatctggaagggccggcaagttggcaatgggaggccctgaaggttcccacacaggaccccagggtgaagaagtcactaacactgtttccagaagtggggtcaccccgctggaccagaagggccccatcaccttctgccatcagcccaggacgcaacgccctcaccatcactgctggtggagagacccttcctgcagacaccaggcctggatggtcggggaccatgcaccccgcagggacagagtcacagacccgggggagcttgtgggaggcccaggagccaggtctggattcaaagtcaggtgcggctgatgacaaagaccgttcccgcccgcatcctgggtgtgccctaggaaagctgcctcttccagaaacgcagaagcagcaacagaaaacacggggtggggtggcggggcacacggcagggaagcctgtcctgccaggccatctgacttcgctctcctgacttctgacagtttctctgcttactctgaagttaccaggtttgtcctgtttctacaaaccagcctccaaaacgtgggagggggcttttcgttcccatttgtttcccagaaaacaagacaaaatgtcaaaggaaggaagccaagaacattccttggttcctccaaagatccaggtcttcactcccctccgtggccgagttcctgggacgtttcattctttggcggtgctggtgggaggccagcgtcatgcttagcggctgccccaaaccaagggtaaggggtaggggtagggggctggtgtgggcgagccaggcagtctctctgccctctcctctgtgtgtctctcagcctatttccgtgtctctgtctctttttgtgtctctctctgtcctttctctgtgtctctatttctctgcgtgtttgtctcttttcctccatctctatctttttctatctctctatgtctctttgtctctgtctttttctctgtctctcttcatcccggtccctcgctgtgtctctgtctcttgctgtctctcaatatctgtttctctgtctctttgtctgtctctccatctctctttgtgtctccctctctgtctttgtctttcccccaagggcactgatttctgactcatgtggggtccacccagatccccaaaccctcgcatagtcaatacccacaggaaggaacccagaggctcagagggcctggcccctggcatccccctcagtctggacacaggctgtgacactccctgcgcctctggctcagcctctgagtgcagatcaagaagaataagaatctggggctcagcacttttctatgatttccttaagcagagctcagacccccgccaggggtgggctggagccttgctgggaaccccccaggtcggagagccactaccaggctggaccagccaaaccctcacatctctccggtctgaaaccaagggttggacaggctcaggcctctgttgttcatgcacctgctgaccagcccctcgaccagaccgccccgtccagcactcaaggccagcagcaacacctccctctgggccagctccggacagggccttggtgacagtggaggtgaggaccttgctgggccagcccctctgtacacccacccccaggaaggacggtgggctgtcctcaggcgcccccaggccatggctggaggaaggctttcaggcacctctctgcccaccgaggcagcccccatcctggacttctgtcatccccttgctggtcctgcccacaccccttcttggtccagtacaagggtccctccctggaggctgcctgctctgttgagcagccctgcccctgccccctgtgtgcaagcccagcgccggcccctcacagtgagtcacacacatcgcacatgcaccttgtaggtagcctgtcccacctgcccaaaccttcatcaagaccatggtttcccggggtccaagcccatctccctgtcactcacatatggccacgacgctgggcactgcaggcccagagtcaagccccatgcctggcacctatggcagcccaggtgtctgggcttggtggacagagcctcccaccgcccagaccacctgccctgtccacagaccaggccacgccccagctataggtccgtcccctcgtcgtagctggagtcacagctggggcaggggatgtctgcctccccactggactgtaggtccctgaaaacaggccatgcctgctcggccaccatggtgtggccagcccccgatcgtgcctggcacccgggaaaggccagcagacattttagaagaacgcactttgctgacggacatggagtgaggaatgtttcactcatgagctgggtttggcgtcggttctatggttttctgcagagtccccctctggctcccctgacacccctaagaaagagagacgaggctgatgttcaggttgtttgaattaaggaggccctggggtcagcaagtcctgctcccattctacagatgtgaacactgagacggagaggctggcacagacacctgagtgtgggaggcgcaggccctgcggtgtctgcgcgtctggggagggaagtcagacctgccaggtgccctgagaggccagagcctgccccttcccaaggcaatagcaaaaccctgcgacctgagggcacttgtcctgccaggccagcccctcctgggcataggcacaaacagcaactgctcgttgtaagggataattggaaggacagccgagaaaggaatgaggccagtagacccaagttcaggcaagctgatttactgtcagtcctgccgggctacctcctgacaacagcagaggaggcagccctgcttacagactatggcagggctttatagggcgaggaactgggtcagggtgggggagctgagtcggggtgggggagctgagtcgggggtgcagaagggctgagtcggggtgggggagctgagtcaggggtgcaggtgtcttgactgtatcctagagatgttttttgccagctttgttatgcgaggtgaacagatgttaacctcatcttgtaactgcctggacaaacagctactggaggggtcagtaaagcggggggttgtctttagccctgggggagctgtgcagaggtcacaaaagactgcattgtaagacccatgggaagggagagggaacagtctggccggggtgaccctaatactcgtgttccttccctcacatctactggagcccaagcttcccctccctctcctgtgcccagcactggcctcctctccccactgtgctggtctaaggttgccctggccaccagcccagccctggcaagaaccaccatctctcctggtggccacacaacctcctcactggaccgccttcctcgacctccaatgtccagaggtagctccccaaagcaggggtatggcccccactcccttaaaaccctcagccatgcaacaggggtgagtgtcccactggacaaacccactctgcaccaggctcccccaaagctggggacgggcccccttcacccccatctgggcccacccaggtcctcacacagacagacctcccctcctgtgaggccccgccatccccactaccacggtcccgctctggccgaggcattttccagcctgtatcctgacattttccatggccccgctccagccgaggcattctccagccccatatcctgacattctctacggcaggcaccaccgctgaattacacctttccttccaattctgtcccagcaccaggacgcggacccaggagggcaggggttttgctggactggctggtgggttccaagcacagggcctggcacgcagtggggtccggcgatggacgcatgaatgaagccccctaggtacccccttcttaccctggaaccccctgcctgggtctcgtcctctctcccactgtgtccccgaggcctgggcagttgggcgtccccaggcgcctccttgtttatcagacatggcaccgagatggcatcagcagtgggtgagaaacacacgtgcagagcccatccccagaccccactctgccccagagttcaccaagttcccttcctagctggaccttaaaaccccccgggtcctggtgcctgctctggcctctcaaggccaccagggggtgccagcgccccaccctgagcacgcggcaagaagggaggtggggaccccttgattgcaggaggccccttccaagaggggtccagggagcaggaccaggagcctatcggtgcctggcttgagaggaggacgcttcgtgcggggctgcctggcctggccctggacggtccccatggtaggacctggggcacagcaccagggtgcccggtgtccaagaacctcctgaattgcccagttaaacagagtggcatggggctgtccaggattccctgtcccaggggttcaggggcctgtgtgtgccaaagcccactgcagtttcccaggagggcaggggacccccaagtggaggtggccacgtcaccaagaacagaagtgcgtgtggacatccaggtgccttccaactctgctccagccacgctcggcattccgtccagggcaggcactgtggaccctgacacccagcggcacagggactctcatggggtgcagtggggatccagcttcctcctccctgagacctcagggtcagctgctataggacccgccgtggaccactgccctgcaggttcatagagccctgatcccaccacggtgggtgacctcccccagcgctctcagcagagaagacattgacccctgaggctgacctgggtagcagacccctgaggccagcaccggctggagactttaggaggctgtcagcacctcagtcacctccttctcctgcagtcactgtcctgttcttggctagcctggcctcagtgatgctgcccaggcccccggcttgaccgggccagagggccgggccctgctctggaatgcctggggcagccacatcagagaacagattccagaagcacgcagcccctcgcttgcagagcctcattcattactccatgggaaggggggcatgggtatcgccccaggaatcttaaaaatgggcaaaatcagcagaggtcctggcatctgcctccctgaacagggttggcactgggcagccagcgctaaggcagggtgggcacaggacgccggccaacctggggcccactttggcagccaggccaagaaccgagctgttcacaggccgctctggaagacctgggtgttcccttgctggaaggaaccccgcagggccagcaagccccacctgtctctgggcagcgtcacaggcagacctcgaggaccagccgctcggcccatcagagggaccccggggcccttcccccaacgcacttcacgctatgagccccccggcgccccatcaaacagctggaaatggctggggctggagaggccacagagtccaggtcagctgcccaggcacatgagggcacgccctagaggggctttgcagggatcccagcagacacctgggctggctgggtcctcggtgctacaaagcgatggcccccagagctcacccagactcaggaggcagcagtgcctctctcctccagcctcagaaataactgggtgctagactgagtgcatcctggggagcgtcctatctgactctcaccacggcccctacggcggccctcactaccacacctgttttcccagggcggaaactgaggcatagtgaggccgtcctggccaggtgtagcacccaaacccaccagggccccacaccccagcggcaggtgcacttggggcctgctgctgccctgtggtggccagaagggccccagccctggtcgcacggtgctggcagatgggcaacgcctcacctaccctgccagagtgctagaggcaaagatgtgagcaggagccgggccacacggcgaagacagagccctggtccctcccagggatgcactggacatgggcagggcctggacacgcttcctcccttcctacccgccagggctcacccagcccagacctgcccctgaggccacagctccagaaggcccaggccctgcctcctcgcctctcctgggatcctcccctccctacaaaggccccagtcttgggcatagctccccaaagccgggctgtcagtggactggcactgccagaggtcaggtgggacctgcagaccctgcgtgtttattgattgcacgtgggctgcgtgtggcggggatccctcctgcacccccagcatggacatgccccccccaggctctcccaggacaagccacctgccagccagcaccgcgcagccctgcaggctctgaccacaggtcccgtttgccggggacacggccagcctggcctagctccttggccatcacaccgtgggccctcggtccctaggagcacctgcgacccagagcgtcaccctgcaggccggggttgtccagccaggggcaggggggcctgggacgctgcagcgaccttgaaggagacggccctccaccgacctgtcctccgggacctggtgcaggcaggacaggcctgtgtttctatgacaggttcatggtaggacctcggcataggaaacccctcccctctttcctcacttaggtggctgagacctgccaggagcccagaaaccagcctcgggctcccccaggctgctgcccgccaccctggacccttcttcccaagggtctcacaggcactgccgtgctgtgggacaggcccagccacggggcccagctgctgaggaggcagaacccgtcccataaacgccagagaggcctggcgtgcaggatcgcctgcaggaattccccaggaatttgcacccggagtctccacagctcagccacaggctgcaatttgactcgtcaacatgtctactgcagccagggcctctggggtgcagaggctcccagagattcctggagtgatgagggggtgaagtgtgcaggacctgccatgaatgtgtcatagacacactgggccttagccctcagtgcacccagtgtgtgcttgggtaaaaaccaaggcccctgagggctctggcctccaggaacacggcaggggaatgggggcttcggtagtggtcctaggtcccacatgggggcttcagtagtggtcctaggcccctcatggggcccacggaggccacccctttggctagagcaggacagggaggctcaagcagcagctcagcccagcaggctccttaggagtcccagcacgcacccactttcttcaggatgggggcccatcacctgcaccccaagcagctctccccagcactcaggctaagagccccccaaatgcaaggacacccacaaaccatcccctgcctggccccttcgagccacctctgttgcccccatgccctgccctggatgccagccagtgccctatgaccttgccggccagccctttagcccctcctgacggtgggtttctctacatcagcaggatgggccgtgagcaccgcaggggacacctgtgtcctctgcaccttacagaagccctgtgggtgaggtttgcccctctgctccctccaccagccaaacacagcctgaacccacaagggcctgcagagcgtgttcacagggtgcaggtctgcaccccagctccatgcagcttggcctagcctctctacccagaaaagaacatgccaaaccctcagtgtggcccatgagagctgtcaggctgggcactgcagcttccaggcgagtgggcagagcctggcttcactcagctggcagctgcccggtacgggtctgccagaggccagggcacaacccatagccccagacactcccagagggagctcctgcagccgactccatccgccatagccacctccagcccacaccctagagacccccgccaccagccgcctgttcagggggggagaccgaggctccttcaaagatgcaggacccaaagaagcagggacagcctctgggacccatcacagggcacccaggccacaccaatgcccagacaccaccccgccgcccctcagccggggctcccaaaggccctcagccttgccctgggcaggcggtcaagggccaaaggccaataccaagtccatcactgactccaagcaactcaagaactgccaggggctcagtatccccatctgtgaagtggaacaggcacagccccacacccggatgccatggtcagccccagtgctgccctgaagtccagggaatctggatgggacaggatggccgaggcaaggatcaggggactcaaaggatcctggaggctgaaggtctctgacacacccagctagtgggaagagctgtccaaggagaccatccaggagactggggggccacggggtctccggcctggggcaggcacagggagccaagaggcctggtcgtcctctgaacagtgttgaagtggcctgccaccgggctcagtggctgcctggacagccgtccatgctatgggcaggaagacttgagatgcccactcaccaggcagcacaggggcagttgggggagcctacagaagccccccaccccacaatgcctgggagggtccgcctcttaatgtctcctgctgtaattatgtcattaaaagactaccctgtctgtgaagccagcatgggagaggccacacaaccccactgtgcacagagccaaggccagggaggatagcattatcccaggagaaagacagaggcccttttgtgggtggcagggaagggggagaacaaacctggtaattaaacaattcactgcacaaacaggaatccccttcccagagtcagccctttgaaagacaggctggattctgcaggcggtctcagtctccccagctgtcctgtcgaggaggtggcccagcctgagcatagcaagatggtcgtggaggggccacacctgtcccagccgactgtcacgcagggactgaggccagagaagccaaagtcaggcacctgccccacccactcaacccacttcaggcagaaggggccgcctgggactgaggccagtgaagccaaagtcaagcacctgccctgcccgctcaacccactgcaggcagaaggggccgcccggcaggcactggctcccacggggaagcgggactcgggggatttccagggactcagtgcagttaaagaggatgtgcgtggaaaagccaaaggccacagggaaaggatagccaggcaggctgctgggcatggggttttctgattacccagaaaccaggcagagctcctcaaagcctgggacctgagggcagccagacagggtgagagtcaaggaggcatcttccggcccaggtgccaggtgctctgtccacccgccggggcacacccgctgctccagccctgctcagcagacaaccactgcaccaccaaccttgcctccaagaaagaccacatgggcctgggaatgtgaggataggaggctgcccctgccctgcccctgtgccaggccctcactgcctgcagggcatgaagcccacaactggcctagcaggaaatcatcctgccccctccaccgcccagcctggtaccaggcacagagcctgctcaggaggctagtcatcctccccattcacacggcagaggctcagccctccctccagccatcccccggggccacccagtctctcccctccaccaatccccagggacagggccccagggaggctgtggcacacggggacacacacaccacagccctatctccccctctgagccggctcagcaccagcttgtcttcatggctgacacctccatgttcctcgggggcctccagggaccccattaactgtgagcacagacagccaacagcctggggagcaggacacagagagagggtctgggggaccaggggtggccctgggccatcccacaaggaggggacagccatggccagtggctgggttttctgatggtccagaaaccagagagtgctcctccaagcctggaacccagaacagccaggaagggcaggagtcaatgaggcatctcccagcccaggtgtcaggtgtccggtgcttgtaggacacgaccccaccatggaggccagaagcctgttcttgctctcagaggactcccacccccgagcacagagagcaggaaaacaccgagaccaaggccagcctgccccaaaggccagagagcaaggttcctgagtaaggacatcccccccagacacgctgggtcctccccaagggtgctgggtcctcccggctccaaaggccagagagcaaggttcctgggtgagggtgtccccccagacacactgagtcctccccaagggtgctgggtcttccccccaagtgtgctgggtccttcctgcatatgctgggtcatttcctggtatgctggccctgctgggtgtgctgggtccttcctgggtgtgctaggtccttcctgcatatgctggttccttcctggcgtgctgggttctcctgggtgtgctgggtccttgcgggtgcactgggtcttccctggtgtgctgggtccccgtgggtgtgctgagtcctttccaggtgtgctgggtcctcctgggtgtgctgggtcctgctgggtgtgctaggtcctcctgggtgtgctgggtcctcctgggtgtcctgggtcctgccaggtgtgctgggtcctcctgggtgtgctgggtccttcagggtgtactgggtcctcctgggtgtgctgggtcctcctgggtgtgctgggtccttcctgggtgtgctgggttctcctgggtgtgctgggtccttcctgagtgtgctaggtccttcccgggtgtgctgggtctttcctgggtgtgctgggtccttcctggtatgctgggtcctcccgggtgtgctgggtccttcctgagtgtgttaggttctcccagctatgctgggttctctcaggtgtgctgggtcctcctgggtgtgctgggtcctcctgggtgtgctgggtccttcctgagtgtgctaggtccttcccgagtgtgctgggttctctcaggtgtgctgggtcctcctgggtgtgctgggtcctcctgggtgtgctgggtccttcctgggtgtgctgggtcctcctgggtgtgctgggttctctcaggtgtgctgggtcctcctgggtgtgctgggttctctcaggtgtgctgggtcctcctgggtgtgctgggttctctcaggtgtgctgggtcctcctgggtgtgctgggtccttcctgggtgtgctgggtccttcctgggtgtgctgggtcctcccgggtgtgctgagtccttcctgagtgtgttaggttctcccaggtatgctgggttctctcaggtatgctgggtccttcctgtgtgtgatgggttctcctgagtatgctgggtcctcctgggtgtgctgggtccttcctgggtgtgctgggtccttcctggtgtactgggtcctcccaggtgtgctgggtccttcctgagtgtgttaggttctcccaggtatgctgggttctctcaggtgtgctgggtccttcctgtgtgtgctgggttctcctgcgtatgctgggtccttcctgggtgtgctgggtcctccctgtgtgtgctgggttctcctgggtgtgctgggtccttcctgggtgtgctgggttctcctgggtgtgctgggtccttcctgggtgtgctgggttctcctgggtgtgctgggtccttcctgggtgtgctgggttcttctgggtgtactgagtccttcctgggtgtgctgggttctcctgggtgtgctgggtctttcctgggtgtgctgggttctcctgggtatgctgagttctcttgggtgtgctgggtcctccctggtgggctgggttccctcaggtgtgctgggtccttcctggtatgctgggtcctcctgtgtgtgctgggtcctccctggtgggctgtgttccctcaggtgtgctgggtcctccctggtatgctgggtcctcctgcgtgtgctgcgtccttcctgtgtgtgctgggttcccccaggtttgctgggtcctcccaggtgtgctgggtccccccgccaggtaacccctagtcctcctggggcatgctaggatcatttctcacaccagacacaaaaagcctcccccagggtggcctcctggctgagccagctccaggcccagatggaaaccttctgcttggctgcacccaaaggtaagcacgggaaacagtgcggggagcctggaactacagcccaggaccagggtcaggttaacccgaggccacgtccacaggacaaagctgagatgcctccccaggaatcagcccaggctggggctgctgcaggctgcaggcctctggacaaggtcccatggcagggagcaggaccagagacagccccagctccagctccagccagggagtgcacaacatggagagaggctgtgaaaagaacatccctgccccagagcccgcccttccaggagccccgtcctcccctcccaccactccctggggcacagagtctgagtctggcagcggcagctcccaggcctggccgtggctggtcgccaagagcagccctgggtggcgtctggagctcgggcgaggggtcagactcccaccctcagacacagtgggcagcattgaaaggcagtggggagggccgcttcctctccattaatcaatggtcccagtttagaaacagtcgccctgagccaacgccaagggctaaacgggctcaggacaccacccagtcctagccacccaaccttctccaaggctctgcttcctggcatagcctcagggccccaacagctgccagagccacctccagcccacacccgagaggcccacacccgagagacccccactgagggcctcctgcttgaggcagggaaaccgaggtttccttcaaaggtgcaggactcagagtgggcctgggtgctgaggctccaggcaggaccactgatgtctcccccggcttggcaggcacacagcaggtacccaggagcacctgccagctggcccccagcaacgcctggctccatctcaccgagagaggccgaggaccttctagaagcttggctgacccttccttcattcccgaccccgtacctcagggccaaaatgactttctcctctgctctgctcctctgctcctgtctctgtcctgtctggaaacttgtccggaacaaattgcacctcccaaaccttccccagcccacaggcccacctcctccaggaagcccttggggcagccaagcctctgatgggcatcactggaaccctgaccactcacctggacccaggagtgagggtggcaacactctagtgtggtggtgctggagacccgtctgatctgcccctttgactggtgccgggggtgggggggtgggaactgaggcccaaaagggaatcagagccaaaggttactatttatttatttacttatttatctattgagacagggtcttgctctgtcagctaggctggagtccagtggcgcaatcttggctcactgcaacctccacctcccaggttcaatcaatcctcctgcctcagcctcctgggtagctggaattagaggcgcccgccaccacacctggctaatttttgtatttttggtagagacggggtttcaccatgttgctcaggctggtctcgaactcctgagctcaagtgatacacgtgcctcggcctcccaaaggactgggattacaggtgtgagccaccacgcctggcttgagccaaaggttcttgaaccaagaaagtacctagaggtgacccaggcctcatttctcagagcctgcccttgtcccatgaggtcagctgagaccagatcaagagatctgtagagacttttgtgacttcgtgtactacaaaagacaaatctattaggaggtcatttgttctcagtaactttttcttgctggtcttttcattaccaattctgagccaagcccaggtcaccagtgggtgttggggaaggggtgggggcatccatccacgcttgccagagcagcgcacacaggtgggacccgggtgcaaaggcaggaagaggccaggttttcagctgtgaaaactgttcctggttggtctgatgaaactgatactctgatgggaccccaaagtcctcccagggacaggggagggggtctttagagtccccctcgctcctttgcagacccacagggcaaggaaactggcagtcctgggggatcttccaaaccctggaccactctgggagactccacatggcagctgggtgctcttgtgtaattaccccaagagccagggtattagtccgttttccaactgctgacataccctagactgggcaatttacaaaagaaagaggtttaatggacttacagttccacgtggctggggaggcctcacaatcatggcagaaggcaaggaggagcaagtcacatcttacatggatggcagcaggcaaagagagagagcttgtgcggggaaactcccccttataaaccatcagatctcatgagacttattcactatcacgagaacagcacgggaaagacctgcccccatgactcaaccaccttccactgggtccctcccatgacacgtgggaattatgggacatacaagatgagatttcggtagggacacagccaaaccatatcagctggggacaaagtctgcacctgagccatcacaatggttgtccctgccatgacccccacttcccgacccttctgccaggcccactccgggcctcacctacgtggactcacgcaacctgcacaaaacatcgccaaatctcctccctgctgaacagaagggggactggggtccaagaggtggagtaggttaccccggtcacacaggcacaggcctggggaacaccaaagccagccctggacaaaatgagcggctggccctgactgtgactgcgccgaggcctgcactgggccggggaagccttcactgcagggcctgcccagcgccgggccctccaccctccgggcagacaggcccgctttgtgctcccacggctcccgctgcttctgcggaagggctcccagggcctcagggaaacactgctgcaaagtccccgcccgctgcagacccgagacttgccatctgggccaaggagggagagctggggctgtgggcagcagggagggctccttccccccactgccctccatagctgcccagagagttcctgtctccctccccaactcctttgttcaaatgaaataatttgggggaaccagaaaatatggcttttattttcaaaactggaatcaattataattggggggttagtgaaatattcccaactgcgtttgagctcaggtctgcagtccccagacccagagtggaggagggacaggaaggtgatggtgagaggtctaggtgggagcactatgggcaggggctacacctgcaggcagcaccccctcagccctggtcctgcacacctggccctgcaaacccggcctgcacactcagccctgcacactcagtcctgtacactcagtcctgcaccctcagccctgcacactccaccctgcatgcccagccctgcacattccacccctgcacacctggccctgcacactccacccctgcaggcctggccctgcacatccagctctacacactccatcctgcatgcccagccctgcacactccacccccgcacacctggccctgcacactccacccctgcacacctggccctgcacactccacccctgcacacctggccctgcacatccagctctgcacactccatcctgcatgcccagccctgcacactccacccctgcacacctggccctgcacactccacccctgcacacctggccctgcacacccagctctacacactccatcctgaatgtccagccctgcataattgagccccgcaccctcggctctgcacacccagcctccataccctccccttcttccgagagagtgaccagcgaggaggccgggcagccaccctccagcttgtcaactgccccctgtgaaggccacgtctgccccaactggccactctcccaggaggcccgctacccaagggccacaagccagccacaggggaggatgctcctgccctgcaggggaccctgctcccctctcctccaaagcaaatctcaacagctcccccgggaccaaggcttgtccctgcaccaggtggcagcatggccagaagggagcacatggcactcctcagacagacctggcttcagccccaactaggctgcttgtgagctgagcaccagcagctgctgggtctcctcaaccttgctttcctctttcatgaagcaaatgaagtgtggagctgatgaggtgacgcaggcagagagtggcccagagccaggagggagctcccagcctccagcctccctgctctgcggtgcgttcccacggtgactggggcatggggctgctgctgtggatgctgagccccgggcccaggcaccgtgagagtctgtgacacagaagtcagagccaagaggctggtggggcgcagggaacctgagtgcaccccacccccaagcacccaagcatgggcatctgagcccactccgcagtgctggcctgggcctggggaagacaggcccctcccactgggcatggagcccccccaacaatgccaaacccccaaagatgcagagccctcgccccacgctggacactgagcctccacgagacgccgagttcccccacagggtgtgcagcccgcagtgagcctcctgcaagccctgtgcctgccgatgccccggggtccacgcgtcagggtctcatggagcagggggcttggagctggctcctgacaaagatgaggtgggaggaggggactgacggtgggcagaaggccagccctgagggggcaggtcaggtgtcctccctcccctcccagaggacacggccaggaaaggccaccccgcaaggccacctcctcctcgccctcccctaggaacagagaccacaggaggctctgcttggccgaccagtgagccacagccccgtcccggaaacctccccagcctgcccagtcagccctggtatttccgcgtgaaaccaaagtcaagcggcgcacattgccaaaagattagacaaatgagacggaaaggccctcgggacatttctcaactcccacctgtggccaaatgacagctcccaagaagccaaacgtgacagtggagcccactccatcctgtgtggaccccacctgtcctcggaacagggatgggtcacctctgaccagcccgcagagggaccacagggaggcctggccaaggcctgcagcctggatgtcacagggcaatgacagggcaggggccctggggggggggggccctttcgtccacacgagacagacagatctcagtccatggtcactgcagcagccctcccagccacccagcatccaggaagcagcaggcactcgcggtgactcggcaggggccgtcccagctaacagaggacattcaataaaccctccagcaccaactgtccgcctttccaacaatggccaatgccccaggctgctggcacccagctcagaactctggggagacccagcacctctgcagaacccctcctcagcctggtccccagcggaacgtggagtgggcaggagtgtcacccagctcagaacgctggggagacccagcacctctgcagaacccctcctcagcccggcccccagcgcaacgtggagtgggcaggggtgtccttcacaaacacggggacctcctgattcatccgatttcctcgaatcgcttcctgctgcctgcctgggcaccggagtgcatctctcgctctgccctggcatctgcctggcatggagccccggtggccaccacacgagcagtcccaaagccccagggccactgggagtgtttcatgccatcgggacggccgtggctcaggctgtctgaggccaggatgaagaaacccgggacagagcaggaagccacagaggaagggaagactcccgcttcccatggcccaaatgaatcaggacgaggctctgccgcttttccccgcattggcacgcacttttctttacagaaatcccgtcaccccagtagcttgctttcagcccatccccactccctgcaagcatctccttcgccaccagctcctgcttcaacctggtcttcagggcctgtgcgggagtcccatttacagctgtgctgcggttactcaaccagtcgccttggctaagacccccgggtgtcccccatcttttaacactgaggacaacgacagttcagcaaggtggcagcacaggtggagaccctgggacctggccaccccctgcctttctagggggccagcgtccccatttataaacagcagggctggacgcagtgggcgctgagatgatatgcttcagcgccacccactgacggggggtctctcagggtcacccttcccctcgacaccctcagaggggctgcagggaactggtggagggattgcggaatgtcctcagaagaatgcccgttcactcggggtgtcccctacacagctgtgctggggacggccagtggccgacacatcctcgccccttgcccacaggctggccatggccagggccttggtcccccaggggctccactcaccatactgacagcggggtccctggaagccggggggacagtgacacggctgggctgagcctggcacacaacggccaccgtgaaaacagaggctggcgctgcattcagctgcggagggaaggagaaaatcggtgagaggggcaaggaggggtgaggcagggggaggtgaggcctgagggtctctcgggcaggcagcccacccagcctgccaggtccccagccccgttctctctgtcctaggtcacacattgcccggccaccaatggaggctggcgtgtccccaaactccagccacggccacgtgcagttggggttaggcggaacccctctggagggcagtaaagccctaactcacttcacctagatggggaggagccaagggcatttcctggggaaggtgggcagggagtggggtctgagaggggtgggaggagggaaggtgggggtgcaggggggaggggtgggctgcccagtggtcagcgctgcacagctgcaagggccggctgaggacccccctcaagaccctgatggtagaacctactaggttggccccagccccgggaggggaggctccggcccaggccagtcagaccccagggaggggaggaggaaaggtcccggcaggtggggagccaagtgttgacagcggctgccctggggctccccagggaaagcgaggccagggtgtgagggtggaggaggccacagctggacctgagaggcaaggcaggggctctggagagagaggggcgccttgtggcttggcaggcagccccgttactgacagacccacactgcctcactgccccctccacagcaggtgccccccaggctggaccgggtgccccccgggggctccaataccaacttccttcaccgggcagcccctaccctgcacgttactacttgggagggcagggccagggtgggatggcagggccagggtgggtgggctgcacctcacccctgaggggtgcttgctgggtgactgcatggtcagcacagtgacctgagaccccctgccccaccccggagcctgtgtgacctgtgggctcagtgagtttgtgtgtcactcacagcacccctgccagtagcagggagggaagctctagacaagggggccctgccggtggctgggctggggctcctgggattcccaggcacaggtcgtgtcagctgagaggaagaaggacactcaggcactcgtcgtctaagcagccccagaccaggggctgtgcccggtggggaaactgaggctcagagacttcattacctggcctggaccacagagtgagccatgaccggctcgggcttcagggcctatgtggccatcctgtttacagatatgcccaaggccagcacccaaacctggacttggggtcaggaggacccggcctgggctggcacagagaaacacgggtccctgtgaatgcttcttcctcccaccctcctgcaatcacagccactaccattgccccaggcatggcggcatcccctccccacctgggccctcacacacatctggccacattcaggccctaccagcctcttccctccagccaaacacctgcagcctgaggatgtgtccgaacgcgatagggtgggggccagggggctgcagggaagccggatggaagttgccatgaccctggaggaagcacaggaaattccccagggaccggggaccaacccggggcccagtaacaggaaacatccgtgtcccaagtgttgaggcctgatgcctgctgacttgtgcaactgcagcagcaagccagctgtgtttagttcccaccatgaggaaggttttaggttttccttgtcctgaagacctctagccccaaatagccaagaccaatcacccccgggtggggagcaggtgccggcctggagaccacccctaggatgctgccctccccaggctctgctgaaggacggaaggcaggacctgcccagatctcggagcctggggaaaagcagccactcactgcctccctcctcccaccctgtttcccacgggctgggccccaccctcctgttctcagggcccctctcctggagcccgtgcacaccaccctgtgtccctcccctaaaccccataccattccctccctccctgccctcccaggaagcatctgcctaaatctgaaacaaaggggaaaaggggcgtgcttctgaaaatcccagccagatccagcatccctgctgtcccggctgaggacaccatctctcaaggcaggcggagctgactctgccggcggagaggggcacacggaccctaccacagatgcacccagcaggacaccaggcccggggcagccactgccctctcttcagtgtccaggacagacattaattgttgctcttcatcctgggctagaaggaggacacggagaccaatgattaacgtctgtcccaggctgggagggtacagccacaagatgttccccggaccctggggcagtcactgggatgcgcacacagcgaatcctcccagcagctcaccgagcggctcagaccaggggtctgggagatagccccgtacgcactggatcattcacctgcatcccgtccaaagccagtccagtcgggtccaccctcagggtatcttgaacacacccacgtctctccacctcgtctcctccatgacaccaaggccaccgtcatcccctgccctctgcagacgcctcttagccggccccagcttctcctgctcactctatttccattctctaccctgctgccatagtgactttttagaatacaactcagatcttggttccccggttgcaaacccttcactggctttccattgacttggcacaaaacaccgcggcccccagatcctccctattagacccccatccagctcctggcctcaccccagactcagctctccctgcttgggggcctcccatgagaaagctgctctccgtgtggacaactcttctcttccccaaatgtcacttccacagggaggctccctaacccgtctccaaatcagagcccacagcgccccgctcttgccccctctagtgcctctcaactgtgattaggcactcagttggggtgacagctcacttcccatgccaggccctgggctccctgagagcagcccccaactccatcttgatcgctgtcacgcacccagttccgacacgcaggtgcaccagcaagcttgttgatgaaggggtgaatgaatgaacaaaccaccgcatggccaggccagccaggtgtgagagacctgtggatgctccttggggaaagggagggtgcaaggggacggaggaggagggctacccatggacttgctcccaaggggtggaaaaatactacgaggctctaaaacaaagatgcgcaaagctgcgctccaaaccgagagcaggtgttcctggtagacacccccatgccgtcagcatcccctccgcactgcagcatgtgctgacaacccacagccaccagacaacccacagccaccagacaacgcgcagccaccagacaacccacagccaccagacaacgcgcagccaccagacaacgcgcagccaccagacaacccacagccaccagacaacgcgcagccaccagacaacccgcagccaccagacaacgcacagccaccagacaacgcgcagccaccagacaacgcgcagccaccagacaacccacagccaccagacaacgcgcagccaccagacaacgcgcagccaccagacaacccacagccaccagacaacgcgcagccaccagacaacgcgcagccaccagacaacccacagccaccagacaacgcgcagccaccagacaacgcgcagccaccagacaacccacagccaccagacaacgcgcagccaccagacaacccgcagccaccagacaacgcacagccaccagacaacgcgcagccaccagacaacgcgcagccaccagacaacccacagccacagccaccagacaacccgcagccaccagacaacgcgcagccaccagacaacgcgcagccaccagacaacgcgcagccaccagacaacccgcagccaccagacaacgcgcagccaccagacaacgcgcagccaccagacaacgcgcagccaccagacaatgcacagccacctgcagcagcccggcctccagagctgtcgagggccacgcctctccctcattcacagaatgggaactggcagtgaggaccgtggccatttgccagctgcccagcttcccaggcatctgctctagggtgaaactgggcaggtctgcctcaaattcctagacctaaggctgggagggcccttagaggcatccagggtgccaccggcgcaggacggcaggtttggggagggcatggcggcatgtccaggccatgtctgtagcctctttaatgccccccactttctcacattggactgaaccacaagcaaacgcctctcccagtggctggagctcatttccagaatcgggttaactgtggaaaggggactggattcctctccagggactcggttcctgcaggtgaagaccttgggccacttctctggagctgccgcttggccagagcccttggcaacttttcttcctgccccttgaacaacccagccatcctttgggaagttggggtgaccaccaggcggatcaagccttcctctcctccttcctcgcccaccaccctggctctccaaaggtgatcgctggagcaggggcagtgcacccagaaccttccagaagaaggagctccagctgccactaagcatcactctggactctggtgactggcgccacgtctgtgcctcatggcctgtgttcccccacaccagagtcccagggcaggcccacgtcccctcaccatgcaccagcagaaacctccaggggacagggacggagccgaggatcagggactcctgccccttctgctgaggacattgagcagtccccaggcctgcatctgagacggtaaccacagaatccagggtaggtctctgcccgcaagcaccggggaggcatgggcgggtggtaaggccgctgccctcagcacctgcacaccccctggatggggctcccagcccggaggtgcctggggactctaaggcgtcacggggctccccacccagcaccctacagggcagctcttgtgctgaagagggaacagaaggaggttctgggccaggtgtgaggatggagctgcagccatgaatgggagcaggtgtaggtgtgagtgacacacgtcctgtgtgtgggagtgagtgacacgtgtcctatgtgtgagtgtgagtgaggacacatgtcctgtgtgaggacgtatgtcctgtgtgtgggtgtgagtgacacatgtcctgtgtgtgggtgtgtggacacgtcctgtgtgtgggtgtgagtgacacatgtcctatgtgtgagtatgagtgaggacacttgtcctgtgtgtgggtgtgagtgacatatgtcctgtgtgtgggtgtgtggacgcatgtcctgtgtgtgggtgtgcggacgcatgtcctgtgtgtgggaatgagtgacacatgtcctatgtgtgtgagtgaggacacacgtcctgtgtgtgggtgtctggacgcatgtcctgtgtgtgggtgtgagtgacacatgtcctgtgtgtgggtgtctggacgcatgtcctgtgtgtgggtgtgagtgacacatgtcctgtgtgtgaggacacttgtcctgtgtgtgggtgtgagtgacacatgtcctgttgtgggtgtgacacatgtcctgtgtgtgggtgtgaatgaggacacatgtcctgtgtgtggacacgtcctgtgtgtgggtgtgagtgacacatgtcctgtgtgtgggtgtgtggacgcatgtcctgtgtgtgggtgtgtggatgcatgacctgtgtgtgggtgtgacatatgtcctgtgtgtgggtgtgaggacgcatgtcctgtgtgtgggtgtgagtgacacatgtcctgtgtgtgaggacacttgtcctgtgtgtgggtgtgagtgacacatgtcctgttgtgggtgtgacacatgtcctgtgtgtgggtgtgaatgaggacacttgtcctgtgtgtgggtgtgaggacacatgtcctgtgtgtggacacgtcctgtgtgtgggtgtgagtgacacatgtcctgtgtgtgggtgtgaggacgcatgtcctgtgtgtgggtgtgtggacgcatgtcctgtgtgtgggtgtgtggacacatgtcctgtgtgtgggtgtgtggacgcatgtcctgcgtgtgggtgtgagtgtggacacacgtgctgtgtgtgggtgtgaggacacatgtcctgtgtgagtgacacgtgtcctgtgtgtgggtgtgacacatgtcctgtgtgtgtgtgaggacacatgtcctgtgtgtgggtgtgagtgtggacacacgtgctgtgtgtgaggacacatgtcctgtgtgtgggtgtgagcgaggagacatgtcctgtgcatatgattgagcatggtgtgtgagcatatgtctgcacataagcatgcatgtggcgtgtggccttgtgcacgctcgagtgagcatgtatgggcatgatcgtgaataggtgctcacagatgtgtgtgcgtatgcgtgtgtgtgtgccaatctgtgcaaggcagtgcatgagtgagctcgtctggtgggcggcgggtgcagatgcaaacgtgtgcctggcacaggggtctgtgagtctggatgtgactccataggaggagagacgtggggtgtaggggtgggggtcacagtgggacagcaggtcctgccaggccatttgtgaagcccgtgctgtgtctgcatggaggaaaagggagcccagagcctggggggccagctcagccaattcccacgctgggactcggggctggcatgcggcccgaacggaaaaggaaaagcaaatggcggaggcaggaaaatggagggcggcccggggtccacagagggccctgcagccccttcccagcaggcccagccaaccaggtgggcagaggccacagggcccagatgacccaggaggggagggagacctgccgggcccgccggcctgatggtccaacagctggacatggggccccaagcccaggcctcaccctggcacccctgactataggtgccaaggccgcaggtgcaccagagcccagatccagggcagtgtccagcagcctggacccccatcgattctgccaaccccacctgtgtgcaaggaggaaggccaccacccccgtccggggtttctgcagcaacacaagctgtatatagcacccttgacataagtaactccatcttagagtcagactctatttcatatctcacagggcactttgccaacaaggacaagctgtctgttgcttaataaacaaattttaaaaataaagattgcatgcaacacaaacaagcacactctccactctcaggcctcaccgaggactccgcggtcataacaccagcgggccttcagctgctggaaagggctgtcctcgtggaaagaagtcagcatctgccccgaaggctctgccacatcagaggcccttgtaaggcccacggaggccgccagggccagaccaggagatgctttttgtctttgtttgtcttttgtctttcctcccgttgaccctttctcctatctctttttctcccggtgttcaatgtgactttgtttgttgtgaaatgtttaacctatagcatttatatattgactaagtacactgtgatgtatagtttgcaatgttgacgggcgtgtggagcggcgggagcctgcgtgcctgcggctctgactacagagtgaaccggaagcacgaaggagaaccgcctcctcacgaacttcatggagctcacagcctctgtgatagaaatagcatcaataaagtctgacattgtggaaagacaggatcatgctcatgcgtggacctggctatctctgagcctgcactgctcatgagacaaaccatcgcaacacctccctgcagactcaaagcctgcgcaggccatggatttcctgagaatgtgtttgtcctccctggacagctcagcatcccccaggtagcaaggggacaggaggggccaggaggggacaggagtggccaggagtggccaggagggggcaggagtggccaggagggggcaggagaggccaggagggggcaggagggggcaggagggggcaggagggggcaggagtggccaggagggggcaggagaggccaggagggggcaggaggggacaggagggggcaggagtggccaggagggggcaggacagggcaggaggggacaggagtggccaggagtggccaggagggggcaggagtggccaggagggggcaggaggggacaggagggggcaggagggggcagaaggggacaggagggggcaggagggggcaggagtggccaggagggggcagaaggggacaggagggggcaggaggggacaggagggggcaggagggggcaggagtggccaggagggggcagaaggggacaggagggggcaggaggggacaggagggggcaggagggggcaggagtggccaggagggggcaggagtggccaggagggggcaggagggggcaggagtggccaggagggggcaggagtggccaggagggggcaggagggggcaggagtggccaggagggggcaggagaggccaggagggggcaggaggggacaggagggggcaggagtggccaggagggggcaggacagggcaggaggggataggagtggccaggagtggccaggagggggcaggagggggcaggaggggacaggacagcctggagagaagctctgggtagtcgcactgaagcgtcctccctgggccgtgggtgcctgggggtctgccccagagtcgagggccaggcaggctgggcacagagaagggctccaaggtcctgcagccccagccttcacagaggcagggccgggcccaagctctctagactcagttcttgctccatctgcaaatccagaatcccaccccttctctctgcccctcctgaccccctgaactgagtgagccctgtcacctctcacaagggccaccatgaagcagccctcactcccacctctgccctgcacggcaggcccagcccctcctttgcacagactctgcccctgccctcatgagggccccaggcctatccccctgtggtggggtggaaatcctgtcccccaaatattcctgccttcctgtgacctctaaatgtgaccctgcttagaaatggggtctttgcagatgtgatgaacaccacgactgagatgaggccctgctggattagggtgggccctagggcctatagaaaaggccccagagacacacagaggggagatgaccatgtagagacggaggcagagtggggaacgaggcgtctacaaccacggaacgccgcggaagctggaagagataggaaggaccctcccctagagcctcaggagcaggcacagccttgctgacaccttgatctgaggcttctctcctccagaactgtgagagagtaaactcacattggtttcagtgcttggctcgtggtccctcgctgcagcagccccgggagctcatacctgcgccccccaccccacgcccgtcccatttgctccagccacaagatcctgcctcagggccccgcaccttctgttccctactcagtgacctcttcccagggacgtgcaaggcccacccctcacatcagtagaccaccaccacccggacagaggagccttcctggacccccatccaagccagcaccacccagcccctctgccccttcctcctgcctcactttactccgtagcatttctcactggcggcttcatcctttcctgagtgtctcctgcaaggacaggagccccaggaggtcagggcaggtgcaggtttctgctcactgctaccctctgggtcctgagcaccgtggctgggcctccatgaccgtatgtcaagtggatcgcctgcatcggccccgttcaacacattttagggcactgttttatctctgtgactttgtggcttctttattttccttttctaagatggcctcaagattcaaggtgcaattagtttgggaaagcctgtatagtctgtctcaggaatccacagggcacattcgcatattaaaggctctgaaaattcctgcaaaagaagaaatctgctgaactctggtttaggaagcgcttactggaccacagaatcccttcccagtgcccatcacagcccatggagctggtgcagctcctaactgtatgctgaggccctgcctctccgtccagtggcctccccctcccctgggccaggccagcacagcccgtatgaggagttgcggggtacagggggctgcaggcagggtattcctgggctttgttcctccacggttccatctcagggtgtacatgcggaaggaccagcgagtcagctgctccaggctggcgctcatctgccactctgcccaccggggagcccggcttggaggaggggtgcccaaggtaaatggtgctgccaggaccagggagactccggctgaaacatgggcagggtctgggaaaaacctggcaccggaccaggataaaagtggaattcagagaatccatgagcaggaaggacacccccccagcaagaggagtgggtccgaaccccactgcacccgggccacaggctccgcaaggcgttgtgggctctggaagccccggtcatgaggccccaccgccccgcccggcactaagtaagtggctctcagggaaatcataacacgattagcagcttccggccagtctcacgggcgttagcctactcctcgctcctacacaaacacggcagggctcccaggccctgacattgtcctccacggccgggtgtccaggtcacacggaagcaaggaaatttcacaacggctgggggctggggggcatcatcggctcaggggcctcccctgtccctcccctgccagcaggggctggagggtgatggagaaacaaggaagggggcaaagggtgagaaaagagagggcagagacagagccaagccctgacccacagggccctctaaagagtgagcgtctgtcctgcacaggggccgtgtaaagagcgagcatctgtcctgcacaggggccgtgcaccccaccatcatcctccagctcacagggacagcggtgccctggtctaggaagcagggaggaccctggctgggcgcggccccagtgcccacaggcacactggctggggagaccgtgagcagccgtgtgtgactctcagcagaccccacagaggcagagcctcccaggggctgaggggctccagcacctgcagggaccttgagactcccacccaacacaagcccccgaccccaccagcagccgcgccccgccctcctcgcatgagccagcagagatgggaagcgcacggcagagctggaatgtggcgtcggaaacgctcggctaacccagggtgggaaggcagagcctcagctgagcacggggaggcaggaagagatatcccagaaccaccgagcagggggtaaggccctgggctcggtccccagagacccctgctcacaagcccttggccaagggatgccaagaccaaggtgcccgatcaccatgtgtgccactgtcactgtcactgctactaacaggagtcaccacaggccaagcagacttcacccaggcctcctcctctaagaacaagagctggcactgcttgagctcttactgtatacaggcaccaagcaaaggctccacatgaagtgactcatttaatcccaggttttcaggtgggtgttgtcacacctaagtcctggagcctgaggcctgatgggggcgcgggcgagggggctgttgggggctgctaccaaggtctcagagctcacaagggacctgatgggggcgccagcgaggcagctggtgggggctgctaccaaggtctcgtagctcacaagggacccgatgggggcgccggcaagggggctgttgggggctgctaccaaggtctcgtagctcacaagggaccggatgggggcaccagcgagggggctggtgggggctgctaccaaggtctcgtagctcacaagggaccggatgggggcaccagcgagggggctggtgggggctgctaccaaggtctcgtagctcacaagcgacctggagggaactgagcccagtactgagccatgttttccactcttggctgcttggacgggcatcggcatccggcccatcagcgaacacttgctccacatgctggctcaggtcaggccaggccagggtccctgaggccacccattctgccctgccagggcactactgtgggatgcagagaagcccccagccccagccagcccaacaacctcacacagtggccccaggagagcagccggtctagagagaggctggcacggtgcccccaggcctgcaggtcccggcgtgcagcccactgccctgagaggggcagcttgaggaagggcctgcaggcttccctgcctagactggaggcctcgtggtgtggggaggtccaaaagccttggccaggccccccgctgaccctgactcactgctccctctctgacgttccgggctcccaggcagccccccagacactcccgcagtccccagcaccaccctccaggcccccaatggccctcatctgctcatcctcactcctgcaggcctcgtcacaccctggccacaggagaagcatctgctcacagtcagcatcccagccatgagctccacatgggcaagcacccgctgccagggtccccgaacccccaggactcggcagcagctgagccaaaacccagcaaacaattgagtgaccaaataaatgaatgactctgtggctagcacaggacgcgccaggcagcacccctcccacccttggggctcaggggtagcccgtgtgaaccctgactcctacccacccaccgcccccctcacttgctgggacccagccatggggttgaacagggagcggccagagaaggagatcacagggattccccggaccatgaaaacaagcaaaagtaaaaggtacaaacaagcaaatcttgcgctaaaaacgaatgtttaaaaacaagaagaaagccaaagctcaagtccaggatctgtgtggagaccccaccgacgtgacaaccaggacccccaccctcccctgctccctgcccccagcctcagcccagcccgggctgccccggggagggtctcagccaagatgccctccaccccactccggccagcagggccaggccagggcagagccaccacgttcttctaaggctccagggtcccacatgcagatggcggcctagtgcctggccacagcacaggcagacagagctggcaggacgggcccaaagctcacctcgagccaggctggtgatggagatgggcacactcactaggccctgctgggaccatcgagacactgagatccccacagcggggagcggctgaaccagcctcgggggacgacccagcagcccctgccctcaagcctgactctgagacagttactgctgacgcaggtgaacacaggggcacacgaggatagccagagcccagctcggggctcggaggggacggcatcgggggaacgcggctgcgcacacctctacctgcagttgccttccccgcccgggctctccacccccgccccacccaggaccccaggcccaggggcacccccacccccgccccagccattcatgcggctgtgccttcaagtcccctcctgggaacaaaaagcccgctctcccccagtaaaccctggggactcgggctggcagccccacttcctctccccgcccccggcctgctccaagctgcctattgtttccccccattattagaatcccctttggcaggccccagaacccctgcctcagagtggaaacccgggggagccttggctttgatgtctgccccctccccactaaaaagacccctttgttcctcccagacgacaggagcaaagaaacaggcacagctcaggtgccatcagcaacagtgggggctgggaccccctccgaggggcggctggccagcacccccctccctgctgccagcagtggccccatctcctcctccttccttgttactctcctcccttcctggagagaattacccacttcctctactggaaaaacatggccatcatcccttctcttccccttttcctgctggagctcgggccaggacgggcaacttcagccccggtttgcagcctgcatgcttcctgtgtgagaagagcccctgcggctccaggcaactacccgccataaggacccctagagctgggttctgttcctgtcaccggagcccaggggagcccactgtccattaaacctcaacgtggagcgtgctggcgggacatggtggctcacacctgtaatcccagcactttggaaggccgaggtggaaggatcgcttgagcctaggagctcaagaccagcctgggcaacatggtgagaccctgtctctacaaaaaatacaataattattcaagcgtggtggtgcacacctacagtctcagccactcgggaggctgaggtgggaggattgcttgagtccaggaatttgaggctgcagtgagctatggtggtgccactgcactccagcctggttgacagagtaagaccttacctctaaaaaataaacataaaaagtaacaaaataaaaatgtggggagtgcgtgactcccggccacactccacggcgcagcctgtccctcactggcaggatgccacctcgattttttaggggaggccggctttatgggacagggtcccatgacctctggactgacccctcccagggagggacactgacccctttgcccaggcggtttcactggcggggcttctgtccccatgcctgaaacccttcccaaacatctctgtagctgtgagccccattccttttacaaagcagaggcttgagagccgcccgctcagctcagaccacccaattccagtcctgggcccccatctctgagccccagcacatcagcacctgcccgggtcaggtcgtatgcagcacgggcctctccaattgtgctggctacataacggagagaggaaggagcggctcccttacacccactgaagctgaggcccgccacccggcccggattggccttgggagaacacggtatagggaaacagggcagggagagggactcagggagctgggggtgagcgtggtgtggcaggtaaaccccgaactaggctcaggagtccatgaaccacagacaccaatgcatggccccaggaaaccctcagacaccctgccaatggcaggctcctgtcctccggcagagccagcaaagtggactgaccccacccggccccagctctctctttccgcagctctgccagcctcgctgacgtcgcttttgcagcctttggcaaacggcgttgctgagcgagtgttccctgagtctctcgtgttgctggggaagggcgatccccaccaggcccggggcagattcatggctctgctgagtcctctggggtggaggtggagggagggcggggaggcgcaggcggcactcacccgagaggcagccctcctcgtcgggctgctgcatccaccctcggcagcacctgagcacggtccgggcctccgtggtatacacctgcctgtagcccatgtagtagacggttctagaaagaaagagagaagggaagtgcttaccgtcgcgggactggctgtattcggctctcactgcacccctggggagactgactctgcgtcagccgggttcccggcggcacaggctgcagcaccaaggttcctgggtggggtggctgatgccaatgcccagccaggttcttctgaacgagggggcagcatggaggcagcaggggccatgctggagccagcgacagtggcctcgtgctgcatgcaacccgggaacacgctacctcactgcccctgcctggccccctccctcccgacggtggtcctggctccaggctggcgttgggacgcacatctcaccgctcactcggctctcagtaccaggcaggtctgtgagcatctcggggagttggaagtgcccagccctggagccagaatggcttctgggatgagccaagtgggcccatggtgcccgggaccgggtgggctgtgccaggcaggggaggtgccagttcaaactccatattttgagtccatcagtgaagcagacggccccagtaggagccccacacacaggtgcaatggccactgccccctacacctaggaggacaaagctgagctggggagacagaggagacctggaggaagcagttaggggagcagcaggaggacctgtgtgggcccaggtcagagaggaggcaccatggcgggcaggcagggagggcttcccggaggcagtgtggccagggcagccttggttcacaggctggctcctgctcagatgggacgggctgcggctgtcactaaggctgagcagaaaatggtaaggccccccaggagacggcagtgtcctgctgggaatgggcagcccgatctggccagcctgagaaggtgcccacagccagagagaccccagctacccagaggacatgacgtccccctccccaagtccagacgctgcctcaggccaccagcaccgtgcagtccacaaagcccggccacctcagggcaccctgcgccatcccctgccaagcccccatctccaccccagggcaccccgcgccatcccctgcccagcccccgtctccaccccagggcaccccgcgccatcccctgcccagcccccgtctccaccccagggcaccccgcgccatcccctgcccagcccccgtctccaccccagggcaccctgcgccatcccctgcccagcccccgtctccaccccagggcaccctgcgccatcccctgcccagaccctgtctccaccccagggcaccccgcgccatcccctgcccagcccccgtctccaccctgctcctacaggcatcaccagcccccacgcatgggaagtcttggcagagcatttggcaaggggcctgcctctcccactctggaactcaccctgagtgggacagctacaaacctagagcagagggaaggtgggaggtgggggcaccccagcccacagccccagcaagcctcccaccatcacagccccatcccggggctcgtaagtctcagttcctccttgtctgggcctcttccaactcgagctgcccccaacaggccgccaaccacccgctccatgccccctaaagtgaaagacccttggagagggctggtcggcccgcggaccccgcagcccctgtgaggaccgcccactcattgccctgcagccaccagcagctcacacagctccactgccaccagggagctggttcacgcagggctggggtcatcaggggaatgaggccttggccacacggatgcctactcctctgccttctggaaggttcgctgcctctcgaggaagctcctttcctgcttccccagagcatgggtcacatgagccccaggatccgcctgcccaccctgccgtccttcctcgggaagccgccctgacgcctgggtcctcacccctccactgcccaaacagcctccaccctcactctagcaaggactactagcaagacagacggccacctgtgccacctgcccaccctgacgccctgtctcccgctgcttgttctgcagtgactaatgtccccacaaactcaggtccacccggctgtgaccttacttcttggaaatagggtctctgcttcacctgcagtcaagttaacatgaggtcattcacagtggatgggggaccctaatccagtgacgggcgcccttataagaagagggaaatttggacgcaggcacaggggatggctgtgtgaacaggaaggcagagacggaagtggcggccacaagccaaggcactcccagacagccggcagcagaagctgggggctgtgacagacgccccctcagagcccctgcaggggcccagcctgcccacaccttgatctcggacttccggcctctgaagctgggagagaataaagccctgctgttttgaagccacctggtttgtcggggctcactgcagcagtggcaggaaactcttgcacagctcaccgcgtggtacctgcccaggggtcccaaggctctgaggcctttgtgtttgcaaggacaactgctcacgtgcatgtgagcagcgggaggatggagacagaggcagagagggacagaggcaagacagagagacatagaaagagaaatcgaaggagtagaagatgcgcccgccccgggcctgccctgcagcctgcagaccccacagccagccaccctcccccatctctgccgctgtctgcaggggcggtgaccaggggcccagccaacagcctgggatcaagggcccttgagcctctgggagtggccaaggcagccgggctgccgtctctgggtaacaaaacacccccagcttgccggggctgctgcatgggaagccggaggtgggccctggggaccctgatccaacaaacaagcggggccagtggccggccggcgggcgggccgcttcccggaagcacgtgctcatgcacgcgcactgcacagagacgctctgggagcgccttgcaaaccccgtcttggcaggacatgaaaccacttgcccggacagaaaccgaccaccacggcgaacaatatttggcagagctgagagtgtttgggcctgtgcgtggtaaatatttatcccctctcccaggctgcagcagtgccgggctacgtgctgcttccctgggccgctgaccaccccctccatccccccaaaagggaatgacccttgcagtccctgcagccccgtgaagaccagccctccgttctcctgcagccagcaccagcccacacgggctccaacgctggggagctggttcacgcagggcgggggtcgtcatggtaacgagccccccccccccccccggggcccactcctctgccttctgcagccaccagctcacagtggaggccacggctcagggagtgtgggcctggcaggagggacctgagcggcagctccaccctcagagcccctcccccaccccttccttctcagggaccttgctctgcagagcgcgggagcccctttattcaaagggcccccggccgggtttgtcagggaagtacccactgagggggctgaaggcaagacccctgaatacccgggcgccctctcagctgtactcacagcctcacctactctgggccgggccgggctggagcacccatcaccccgcggccctgcctgaggcaggcagcaggctccacagcccagaagccagacgaggggctgacgcctgctgcccttctgaccgcagccaccacaacaccacaacacagccactgcggggccagcctggggagggggctcatctaatcctcaccgctgctgtgagccaggtggggaaactgaggctttggcgggttcccaccctactgggtctcatccagcctgctggcctcccccccagagctcaggagaggaggtgtctccttgtctgtccagggcaggagggtgaccctgcaccaggcaagccagggtgccctcgggctgtggggtgagcagctgctgcctctcgccctcggctctcagccaccctgcatcctgctccaaccaactggagaattaccagtggaaaagaatcaccacagaaagagaaggccagaagccaagccctcggggacactgtcctgacaatgaggccccaacaacctggcacaggcacactgcaggcacagctggacattcagagccacatgtggcacccttcaggcctgggcagggtgcctgccgccaagcctagctgtggcctcacagcccgagtcaccagtcacccagtcgtgtgacggtggagggcctggcggcagtctcggcccggctggcgaggtggcagatggaggtgcgtagaggctgaggggcgtgcgtggtgccctgccggccagcactcatgcttgctcctcactccagggcctgaggaagcccaggccagcccctgaccctgccctgctggggctgttctgcgcgtgggcaccccgtttctgtgccccgtttctgggctgtgccaggcagcccagaaagggttaggctctgacaggcacgaccccaggcccaggaaatactgtcagctcagttcacgggtgagaaaaaggaggctgacgtcgccaggctggtaggggtggaaccagcgatgaaaccacgagcctcccatggcaccagctcacccttgagtcacccctcagtgccacagtgctgtggggtcccgcctcagctgccccggcctgggctgcagcgccaggagcctgcccagcccttccctgcatctccccagcccgggctgccttccctgcatctccccagaacccaggggcctcaaatgctcagtgccccggctgaatggtggccaagccaatgagcagcgctgcccttgctgagcccagccacacatacccaggtatctgctgtgtggcagagctgtccctgtgggcacaggaggagtggcctgtgcccacctccacgatggcacccagagcccagctgggatgctggggtccccaccagttccacagtgagttgggaacctggtcataagcactgggggctcgagggcaaatgggcaagggctcagggttagggacggggactcctgatggcagaggaggagaagcaatgctctgaaggaggacaggcgggagctggagggcggggaacagggctggctcctgggagggatgaagggagcaagcctcaggccggtgctccaggcaccacccaaagtcttgccgcgtggagtgatatctggacctggcatctgaggagactcccccgaggctgcacagctggattcagcctccagcagcttgggaggggacacaaattggaaacgtgggatttgggagcaccctgtgcccacgaacagccccagaagcatcccaaagggacaggggcccaggccacatgtcaccacctcacttggggctggttccagtagagcacacaggacgcccatccccccggcaccagggtggtaagaagcctctggttcccccaggagcgggggccaggtgagaacagcccagggtcctcggaggtggacctcggcccctcccccatgacaagcccaggaccttgaggcagaatggccacctttcgggagggagggttggtgaagaggcccggacaccctgcattgggtaatgccgggaggggatcccctgccagtgcccccccctccaagcagggggactttgtccacggctgcccccagtgccctgccaggaggctgaggaccccggcacatcggcaatgctgctcccaccctgccttcaggctagcctagagaccacaatggagaaatcatgcccccatagcgaggggacttcctcagcccggccaccagcactctctccagccctgggctcagatggcttctggctgcttctagaaacagagctcttccaccacgagctgttggcgggagacctggctgatgcaaacaaattcccgcagggaaatccacctgcatccatgcacgcatgacatccacagggcaggcccgcatccacgcatgggtgacagtcaggacagactgcaagctgctattttggggaaaacaatgagaggagatttcttctttttgctcagggtccctgaacctcagccctcctgagatctcttgttttgggggctcaggatccctgaacctcagccctcctggtactgggccgggtcgtctgttcggggggtcgtcctgtgtgctgagatgctcagcagcatccctggccccctcagcctgcccagctcacctgtcaccaaacctgactccacatctccactgtcccggggtaggaagacagaactgcccctgagtgagaaccaccattattgcttaacggtttttttctcctctactctgaacacatctgaattgcgcagcaaacacacattgaccagaaagctgccagagccccctggagcaggtacagcaggtgcaggtgtcccgcgtggaccccatgcccaagggagcagcgcagagcagggcctcggctcctccgcagatcccaggctgagaagctagccacgatcttctctgagaatgcgttcctgccttccctcccacagacacacggaaactctccacctgacacgggggctgccagctcccggcacaacccgctttgcggcagggctggctctgcagagcctgagtctataaaagggggagaggtgtgcacaggcactcaagttcggtgttgaaataaaatcttgcgcagtaaaaagtttcacgtgtgttggggaacaaggccctagggccaagaagcagcagcctcccaccgggcccctggcaggctgagaccactctccccttcctgcgtggccagcatcctcccgggctgggcccctcctcctccacacacccctcacaaaggactcaggtgctcggctaaacaggagagggctacagcatgtgagtagccccatggcagacccaccctgagggtgggagaggcctcatgctcagatgagggcttcaggcaggggttgcgtgtggccctgagaccaggacggggtcctggcctcagctgcccagctcccgggtggtcagtgccgccctttgtgtgaatggagcccctcccccaacacgggcccctgcacttacctccgctcatgacccacgcaccacgcctgccacccacagccggccttccacaccggcaccgtgtggcttaaggcctgcacgcacggctggcggcggcccaccagggtcagctcctgctcagcacacacgtggggcctggaacagagacacggagagtcagcgcctcggccacccccagccggcaacacccacccctcctgcacccccagccttgggtgtcagctcatctggagtgaggtccagacccgtggccaggcctccacggcacagtgcccatgccagtgccccaggccagccgtgggacccaggcttgagggcacaggagctcaggggaaaaggcaagatgaccgcaacatcccccacgcatggcccacagcgtggatcctagtgccctaagaccttgcaacacagccaccaacgacgctgcctcaacagacaggaactgtggcctcaaggcacagtcacacctcgtccagaatccaggaccaagcgcgggcccattctgtcctctccaccccagccctccccacctcgcttcagagatgtccccaggcctgatgttgctggggcacatggctggggtgaacccgggcccatcccctgtgaagtcagcggctccccggcatcctatgacccacactggtgagtgtttgctcttggaggaggaggtgaaaaccccagccccatccctgccaaactccttcaggtccctccaaggcctctccagcccagaggctgcataaaccaggggagggggcatgccagggacaggcaccttaagccagccatccagaccccaccgggctcggagcaggtggagaaaggactcaggccctgcggggggaagggtcagagggagggaccctccaaagacagccacacgggccagcacccccagagcaggggctcgcccctggcctgccctgaccgaggggtgaggcgggctccctccacagaggcaaattcggggggagaggacaaggctccagtgctcgtgtcccactacgtcaggtgacgtctggggggcctcagaggaaagaagaggcttgtcctgctctcccagctctggacttgctccccagaaccagggccaggcatacctggtgcgggccggtgtctcccctccagcctcaggtgcagcaagcctggcagatcccaccagagcccctcccacctcctgggggcaagcaggtggcatgggttcccccagcctcctcatcagaggtccccaccccaccgggaatattgtccaggctcggtaccgccctccgcccaggccttgccaggagctcctaaccagccgccgccccgtgggccggaccctggctcagcactcagagactgcccgccccgtccagccaccctggccccaggccagccgcccccagatggaggctcttgcaatggaggacttatttttcctctttcctggggctcgtgctgtgtgggaagccctgtgtcccctctgacttcagcccacccccttgtgctgaacaaatccagaaagcacagacccaacatagcgatggcaaaaactgagaggggcaaatggcagggcctcaccagccgggacagcaggggctccaccaggctgctgtggcacccagaggagggaccctggcctccagctgcccacccacgaaggggcagacgaaggctgggaccagagtccagctccaggtctccagtcaagtccgagaggggctggggctgctgctggacatgtcctgcccatgacctcctgccgagaggttctgcccacactctcccgcagtttcccaaacgtcccatcccagggctgaggcttgcccacccgaggtagcgttgattcctggagtccaggcccaggtgactgcagggtggggcacaaggcagggcacgaggcagggcagagctcctcctggccataagcagggtccaggttccccaccaactcccagacagaccggcagctgcagccgagaagcctccgcagcaatggggaccctccagctaggcgggatcagctgcacgaacccagggcaggtggaaaggctctgccattgcctcttcctgcaccaggaagacaactctcacctgggtggagagcgagacttccaaaatccccgactatttctacctgggagctggggaagaggtgactcgttcaggagtgcctcctccgtgcccagcaccaggtcctttcctgacattacatcatcgaatctctcccctcccagggaggaagtgacagtgaccccctgatctgctcaagatcaccagctaatggtgatgactaagggccaggtctctcccaccttcccccagcactgttgggcctctgtgtcctaagggccacggatcccagagtgagaataggggagggggcaggaccagaggttggatcagggacagagggtcacgtctccagggagagccctcctcagcctccctggggctgggtcctgacctcattcctgacccccagactacagcacccatgggggatggtctcacagcccccagggccactgccccaccccaccctgctgtgacccaaggctgacctctgtggatcacatcctcccagcacctgcacacacacaaacacacaccctcacactcacactctcagtcacacacaaactcacactcaatcacacacattcacaaccactcatacacacacccacacacagtcacacactcacagtcacatacacccttactcatactcagtcacacacacccacacacacagtcacacacactttacatggactcgaacacaatcacactaacagaaggcactcacacatactctcacacccacacaatcacacaaacgcaatcacacacattcacattcatatgcatgcttacacactcaacatgctcatacactcacgcacgttcacacacactcaatcacactcactaccatacccacaattacatacacacaactcacaatcactttcacactcaaaatcacacaccctcatacacacatatgcttacctatacacacatatacacaattacacacatacacacacaatcacacacatacacattcacactcacacacaatcacacatattctcatacactcatacactcacatacacacacatacactcatacaatgacacacacacaatcacatacatactcatgcacacgcacacttctgtactctcacgcatgcaagctcacaaactcacacacactcgcacacacatatgcactctcaaactcccattcacacacactcacagatacacacacaggcacacacactcacttacacactttgccttctggctgccaggtgggtttagtcaatgggaggaccaggaagagatgtggaagaggcactggggtgtggccctcctgtcaggggcggaggccgtgcccactctctccaggttccaggacccggcccccacccaagggatggccttggctccacggtggcacccccgtgcttcctgcgccccttcatgaagatccctccccaacccctcccgggacagtgccaccctgtcctcctcctactgacagatactctgtccccctgaaacttcaaaaattcacactttcatgtaacagtgtcaaatttgggatcagagacaggtgttttaaagaactagcacatcttggagggcagaactcgtgatgaacgcacccaccccaccaaccatcgggctctagggctgcaaagcgtcatgcagtggttctcaaagtggggtcccccggccaggaccagcagcctctcctgggaacctgcagaaatgcacactcctgggccccaccctggaccactgaatccaggactctgggggtggggcccagcattcctcggggtgggaaggattgcgtgtgtttgcccaagcccaccaggggatgctggagcacactcaagcttgtaaccccaggcctagcggtttgaagcaaggtctcaccgccaagcagcctgggtttgaatctcagctccccacgccccatctttaagacgcgcaggttactgaacctctgcctcagtttcctcacctgtaaaatgaggactcacagcagtgaccttgccaggtttgcatgagggttagatgagcctgcacagaaaagggctcccgacagccctcaggaggtgtgagctagtgttactgcagatactgggactgtttattccggaaaaagtgtcacttgtacctggaaagtgggccataggaactgctacaggcattgaacgcttttgccgtccctgtgccttgcaacgcacttacccacggcgagccctgggcacaggtgaccttgaactccttgccataaaaaaacggaagccggggggaataggccaatgatccctgagcttctgggctacagggtccagcccctgactctgtgatggcccctgtgctgagggcagccactgtgaagggactctgtcaccatctcaggatggagatgacacagagagggcagagctgtgagcttgggttttcaacagacaccccaggcctggggcctgctgtgcagcctggagtcactgaccatctctgagccctcaattcagcatctggaaagcaggcgtgatgacagcttgggcctccggggcttggagacatcagggacacggccggggttaggggtactgaggggttgggtgctcccctcagaagggccttcttgtccttcccggccctcctcaaacctcagcaatctcagctgccactaaccagcaagacgacaatgctgaaggactcaccgagaccccttgccaaccccaccctggaccacccagcagcccttcccgcacatcacacccgtcactctcccggcccctgcccgcctggtgcgccctatgtctccccaataactcctccccttcacggctctccccaaggacggagggcccttgccctgcccagccaggctgtggtccctgaaagcagctcctggatggctcttgcagtgacccccaacaaaattgattgatcatcaatcaagccagccttcaaggagggggtgagtgtgggaacgactgtctcctctggggacttcagcactgcacacacggccacagcaccgcacccgcacggccccggcggcctttccacctgtgaggatggagaaggtggcaggggaagggcaggcagaagaatggacaaaaagaaacctcccactgctgcacatgggtctgaggagaacccaataaagcacctggtgacctttgacaggaccagagtcccaggcctttctgttccttgcggctggatcccgcctcccatctgggggcgtggaacaggaattcccaaactacaaagtggacctggtgcagtcggaggcggaatgctcccagctggtgggccatctgctcccgagcagagccggggctccacgggcaagagatgggcgggcatgctgcggggtccctccagggcaggcagcgacagtctgggcccagcgacggcatcaccaggttggggagggcggggatccagaaagcaggcagccagcctggctcagctccccagcctggctgaatgcagcccctgaacaaacccctgtgggcggcgggggtgaggggagttgggggggctcgctcaggacagcggccctggagggcggggctcgctcaggccaacggcctcgcgcttatttttaaaggctcgtttttacccccatggttctcctctgcttatgcttcccagggccccatgcagccagcatgcggggaatctcaaggccctggggttgggggagcccagctcctgccctggggcccctcggactctcaggtaccttcctgtagacaaggagacaatgaacaatgtcactcaaagccccaaaggcagcagctcacagaagtgagagctccttcccctccaggtcacgtgctgtgaaactcatggccctaaggggaggctgagaacagctgccttctacaccctggggtcggggagcaggcctgctgacaacctgcaggcctcaggctcacgaatggggcccttggagcccatggccccagtggatccaaagagctacttgcaagattggacttgagcttgcagggcccgacccgccctggagggaaggcatcatatcattagctgattccagaacactggccatttttgtagcacagctgcccagaggggactccatcagagagaacctgagccccgcgaagcagacactcctctctgtagcccagcagcacctctcagggtctccaaaatgtggagcttccaaccatggctggtccgagccctgcgggtccatgccttagcaggtgggcaatcggcccccgtctcccagaccccgttcccagatgcccagccagcagcctaggcctcctgcatgaggccccaggaaggaggccagccatccttcctcatagtggaaattcactttggagtgacctgaatcagcagatagatcagttctgcccgctccagggatggggcaaagcacctggatctgcgagttggagggcacacccctcgctgcctccgacagcgtctcctagaggccccggcttctagcattaacaggaggttggcagtaacgcttcaactcagcagccagtggttcaggaacactcagccagcgggggtgccgctgccccgtgccaagccctgcctgctcatcagattcccaggaggaaagggtaatggggaggacaggatcagcagggactgagcactctctgggatctggcctgctcctctggggtaagggagccaacagcgcccttgccccacccccgtaccagagcccacagcttcctcctcctttctgctccacagagtgagcctcagaacgggccctgcactccacagcccagtggggacctctccagggtccagcgcagggtccccgcactcactcagcccaccaactccggcccactgcggcctggctgcacgtccaggcacgtgccaggtgcttacaggacaacaggcctgtggaaggcacgcctgccaccgtcacagaactcagactctcgctggtggacgatctgtgagcagaggcctccagtggatacgcctgcagccaagaagataaaccaggggcacaggcccccagcgcagccaccgccacttactgcagccagggaggctccccaggagaagagcaggatgtgaaggacagagaagggagaggaggggaggcttggagaaaggatgagcaaagagagccaactctgctgcaacccatttccaccacttcaaacagctttgccccagggtcacgaaggacctcccgagcccaggtgcagaggcaggacacaggaagcagaccctccactcctcccctggagaccccagcaagtctgagtccggcagcgggcccaggaaggtcgctgacggtttccacagtgcactggtggcagaggcccctcgcaagagcagggacatccgagcagagacagcgggacatccacctccgccaagcagcagcccacccctgggactctggggagcctatgcccctggaagcccctggctggtcctgggaggaggtggctggctgagcagcgaaggccactgttgtgtcccttctgagcctgcagctctcctcggacaaaggcattggaatcacaggaaagaggaatgtcccgccgtcatgtggagtcaggactagggccgttcacactgcggatgccaaggcccccaacccagggacagcatggctttgaaaaggcctccactttctggagtaaagccagacccagggtggggtcttgggagcttggaccccctcctcttcaccagctcgacgtggcagcttcttctgtcagtccccagccagctgcagcttggtcctgcaccgccaggtttgtggtgggccctagagcaccaggccctgctggggagtgctggacgggaacagcctgagggcccctctgtggcccctggacggggaggctgtcagacaggaggccttcacctggacctggccctcgcccacccacccctgccagcaaggccagggagtgctgggtgggggcgccagcgactcccctcctcctcctcctcctcctcctcctccactgccgcacgttttcctttgaggccaacacaaggattgatttgctgttcatgagagaccgctaaacggcccgttggggaatcatctttcaaaattaaattcatctcggctggcttcctgcccattctggcactcagttccttctccaacagcccaaagcacacatgtttaccacacagaccaactccattcagctcccccatctgggcactgctcgcccctgcgaaggcccccagaccccaggagacaggctttggagggaagcgggaacagacggcttcctctctgccttctcccagccgggctctggggccagaccctgcccggaaaggggcccagattcctcaccgcttccaagtacagtatctgcctgagcctgcaggacccacatcacggagcaaaagaaggggagagtgggagggggggaggggacacggcgaggggccctgccacagaagggccccagactcgaccctggagccctgtgtctcagccacctcctccccagttaacgcaaacagcccattgttctggagccccagggacaaagcctcggagctcggtccaccacgggcctccagaggccccggggtccctggacgaccggccgagccctcccagctcctgctactcacatgccgggctgcagcgggagcaggggccgcggcggaacgctggcgcccacgggcacggcggggagcagcagcagcaccaacgccaggaccaccgcgcgccccgctgccctcgcctcttcaaggaacgacatcgtgcgcgccggtgcctcctccgctctccggctcacaggcggccccggcggctccccggagcctccgcctccacgtgcgccataggacgcagccacaggtgcccgcgcccgctccgcggagcccaaggtcgctgcaggtgcggagcgtcccggcttcccgcccgcgcccaaagtggcaccgcggagacctgatcgccgggtccaccctgcaggaactcgccccggcgcgttgagcacagtgccccggactcagagcctggaaagccgccacgcccccggcccgcccccagcccggaccccagtcccgacccgccctggctcgcccgccccctgcgccctcggccccgccccttccccctccccatctcctaccccaccagcgccccgcccccggcacggcccctgtacttgcccgtatccctcaccccagcccggctcctgcttccagccccgcccctagccccctcccctctccggtcccggccccgcccacagccttcccgagtcccgccccagaccccgcggggctggcgcagcccctttgcgctccctgctcgtctcatgcggaaagtccaagtcctaaccgactccagtgaccaatccaggaggggccgggcgccagggggccacaccccgcaaaggcagctctctgggatcccggaccccagacctcgatctcaggagacagccctcagcctccctcacttctcaagtcccacggggaagccagcctcggcttgtcctgcccgtggacgctccgtccaccttcgccctgacacctcacccacttcccgcagggcaggggtcggggaagggcttgaggagggcgtggccagcctctgcagcccgcgtgcaccctggacacccctgcttcggggacctgcattgttggttcccaaccaccttctgggcatccccgttcctctttctgtgctgcatgttcttggacagtggcctggagtgggtgggcgcggggtcccagcagccacagacaggaggaggcgctaatttctagggtgcccatgggcacagaggcactgtctagggtgctaacttctagggtgcccatgggcagagaggcactgtctagggtgaggcttctgcgaagcaagattcacttgtctcctttgaaacctggttttggtttgaaattgactccaggggccaggaccaggtagtctcagggatggagatggagtctctggtgtcagagctaccagacactcaggagagtctctttttgaatagcggagggaggtgcaacctgggtgagaccggatgggggccaggtgtggccccctcattagccacacaaagagccagccatgccggtccctgctagagaggtgcgctgaccatcagctcagccactgaagcctggccaggccctgttccttggaaccttccccctccaaggcttcgtgtggtttgggggaggaacttcgctaatagggagcactggagggagccctggctgggaggggcttgggaagggagcaccccctgactgtcccgataggagggacaacagtacccccaacacacacaggctgtctgtgcctccacaccacctggaggctacagtcctctgggggtgggtggccgtctggccagccttgctgtcaccccagctttacagaaggggagacctaggtcacaggagggggagcaccccaaatcacccagcttgtgaactgcagatccgggaactgaacataggggtctgg

SEQ ID NO: 364 - DNA, 140359 bp, Homo sapiens
  source 1..140359: mol_type = genomic DNA
agcctccgagttgtaggtacaggcagcttttgtctgaaatctcagcttccgaagcggatttctttttctctggcactgggaggtttcgccgagccgggttggggacgggaaagaggagcgcggggaaggatgtctggggtggtgagggcagggcttcgctggagaaagagctagtggggcgcgaggttcttacaggcccgggagaggtcgaggctggagcccctcggcgcctctaagacaaaggcagcggtggctgcagccggagcctagcactccggcagcgtcgcgccgcgccgcgccgcgccctgggcgcacggccgcctcaccccgagcgggtcggagaaagagcctccctcccagcggctccccggccccggctccgcccgcgaggtctgggctgctgcgagcccgcgccgggtttcgctttccgacgatcataaatagcttggtgtttgtaaacaggcgctgggggcacattccccgcgctcagctcattgttccctcccttcctctctacttcgcgcaggacgcctgggctggggctgggagccgccggggctaggaggtgggggagtccagacccgaagtgacaaaatgctagcattttctttcccccggccgggcgtccacctctaacagcaaagaaacctctaagctgggtctgcagaaagcccgagccacctcaaccccatgttctcaggactccttagcagaggctttcccaacctggcttctccctccttttcctccacgatcccgctttgacttttctccttgcagtgtttagttctgagaattcagtactttgcgcatcaccccctgccccgaaaaacactggcagaccccaataatttcgaggaaagtcatgaagtctatgcgcggagccctgtgcaaaataactcccgctgctgcctgcccggcgttgattcccaatttatttcaagagagtcggctttggggagagagtctgcagggggagggagagaaaagaatactgaaaataaagctggcggccgcgggctactgcctgcgtttgtgtgcgtgtgccctgggtgtgtggtgtttgtgcctgggcgtgcgatttaatggagcgcctctctgcctctccagtgcggccagagctcgcttcgcgcacccacccctgccgaggagcctacttgctgcagcccaatgcattgtgtaagacgcgacctgttatggccaccactacttccgggttctagcattctggtcggaatccacctctccgcctgtgcaacacacactttacacacgcacggggactgcaagcgggcagcatcgatcgtggctcctttaagacaaactcagacagacattttttttaaccctccttctctaatctccttccagtgcagcacttgcaaagagggagagagagggagagaaagaaagagagagagagaagagagaaactgattaggaattaggactgattcaagggaagcgagcgctagggctttgtgcatttgaatattaacatttgaggtgttctgaccagaagaagacagagcggatgatcattcattcaccacgttgacaacctcgcctgtgattgacagctggagtggcagaaagccatgagatttggtagttgggtctgaggggcgctcttttttttccttttctttctttctttctttttttttttttaaactgatttttgggggagagaagatctgcttttttttgcccccgctgctgtcttggaaacggagcgcttttatgctcagtgactcgggcgctttgcttcaggtcccgtagaccgaagatctgggaccagtagctcacgttgctggagacgttaagggatttttcgtcgtgcttttttttttttttttttttttttccgggggagtttgaatatttgtttcttttcacactggccttaaagaggatatattagaagttgaagtaggaagggagccagagaggccgatggcgcaaagggtacgtattaaaaaacaattgtggaactcaaatgtgagattaaattgaaacgtggccgaaagacactgctaaaaagtttcctttttttctctctctcttttaaaaaatgaggctcctaaagccgtggcctaagcgagaggatttattcaatgcatttgtagacttatgtatgttacttggagttgttaattaaaggaatctatttatctatagattcctaaccagcagctatataaataaaaatgcaagctcaaacaatcatctgggtttttttttaaaaaagctagatacctaaagctgtaatttgaacattcagagatcagaagtttaaagttatgtttaaactaaaatatgcagctggaaacttctgatatgttattgattatgctcatctttaatatcactagaagtattcagctttttaaaggaaataactttgtcatagtatagccaattttttggtcagaaaacattcatctttttatagtaatttcaatttgtatagacttgtatacaaggcaatattttgcaagtttctcttagataagccctctactaattgaatactaagcacacagttactcactttaaaaatgcaatactaatttccccatattcctttttcaatggaaatgcagtgagagtaaagtgagacaatgacaacccaactgaggtagtttcttaaaagaaagggggtctacaaaaagccttccttgcataatttgtgtcctggccctcaaagccctgtttgcaaaagaaagttactaggctgacacagttttctttactcctttggttcaggcaaatgtcagcgttcttccaaactcttttcacacctctggctttaaggagatgaaagtggcaattcctcctttctttgaaaatcatttcactctcagcgcctccaaatcttgggaaaataactgcctggaatgaaccaattagaaaaacctaaatagctaaatttcacacacacaaaataatgacaatcaatatgaaagtagttttttttttttttttctggaagaggaagatggaaagttgtgcatttgcttttgaatttgctttaaacctggtgagtaacatttgcctccttgacttctagtctggaaacaaagttcataagagtaaataagaaaatagaatattagctgcttcaactatagattttctttaactttgggggtggggaattgcccaattctaaattcagctctgatgttcaggaaaagctaccctcctttgagtttcacttataaggggtcagttagttttgtataatttagcagagtttgtcttggaaagcaaaagaaatgcagtgtcttgtaggactgcctaacctcacgctggcagggaaataaaatgagaagcctgtctaaattcacgtgctttgcgtagctgttcccatcgtaacttttttttttttttttaattccccctgatgtgaaggggctgtgaaactaggcgggtttgctgcagtgtcctggcacgttttattattgtgattttgaatttcttcctccagagacatgcccgtttcaccttctaccctcgggagaatgcttctctttctctctttctttcttctttccttcttgccaaaggagcctgaatttctaaactagttgatagggacacaagttagggcaagatcattcatcccagacgagtctcgctgagaattctgtattttttacttaaagctttaattttaaaataagaaaaactcagctttatagatgcaaggccaccgaattccgggtggaaggacccagctgtattgaccttatataagctcggtgccttgccgttctcccatttgcccgcctggcctcctgaaccttctttctctcctgtttgtcatgcagtacgacgatctaccccattacgggggcatggatggagtaggcatcccctccacgatgtatggggacccgcatgcagccaggtccatgcagccggtccaccacctgaaccacgggcctcctctgcactcgcatcagtacccgcacacagctcataccaacgccatggcccccagcatgggctcctctgtcaatgacgctttaaagagagataaagatgccatttatgggtaggtacaatgggcagcaggttaagtagttgagactcaacgcttccctctttctctgtgcccttggtaagaggaaagtcagagttctctggattggaggtacatctttggtgacttttcattcacatttcatggataatttggggaggtggcctgccatccctgaagccctacatccccatacacactctgtgcacatccagtgccctgctccaccatggcagtgcccgcaagggggtcccagatgagaagaagctggctaaagggcccttgtcccctctcagactccttcagcgggctggagtcctccctcgctcgatttcgcccgagagcgttaggggtttctaaatgcaggcgcctttgtgttgtaacgaaacttttagtttaagggaaaatctcttttaagccactgattgttctgacttgctgagtttactcagcagccttatgctggctctgccactgcacaataaaaccaaagcaggacagttgcaggtcaagcaagggggaacatgttttgcatttagggagtttgaccactgaagtcaaggagaggagcttgctctgaattgttacacacattaagaaacttctagatgttttagcactttgtgctcaaaggcgaaacctgcaggatttagaaataagtaaattcggggtgctcttcctcggaggttgttttctggctgcggtttatactgctttctcctccgccattcgattagaccctgggctagtagaatcctttgaaactcacttgtgcctactgtgtgccgatgaatttgggaacctctttttactttgcagaaacttttatttctatttatttatttttaaaaaatcaggacacactgaccctccctcgctggaaaaaaaaatatatataatctttttattttattttctgatcccttgtgcgatgggcttgtttaattcccaccgttctgtccgcagagttaactacaagtggtttaggctctgggacagaacatttggggaagctttgtaaaggaccccaaactgttaaattcccagctgagctgtgagagctaataaaagacttgagatacctccttgggcattagaagaagcttttctttctttcttcttcttcttcttttttttttttttttcttttttatgggctgagacaagcgacatctaggcccctcgcaatactagctgctttgccacttcgcagagacaaaatgaaaggctctactgcaggaacatttgaaggaactttctttggggggcggtgggggctatcagcgaagggaggggaatgtgcgtggagctgaggaggagcctcccggctctccgagggccttggggttgggatccctaggtgcagcccgttgacagtcggccccacggccatggacgtcctttccccaagttagctgagcgcctgccaccgagatcccccgagcctgggcttcgcgcggccgcctaggaggaacccgcaggaaccagccctccccaactctccgcccggcgcctttctcctccaccggatcctggatgtgcagtggaggggacgagggcttgtcgggtgggaaacttaattcaaaatggctgctggaaacgcttgggttttattcgtagcaaatgttgccaatttctccggccagatacgctaaaccgatcctcagataccgtccatggctcagggcctccgacttcagggctccaggaggaaggggaggtgagcggtcacctgggtctgggggagggggaggaaaaggaaaaaagtagatgacacaatcggagagggggtctgttcctcttgctcctccagctgtttttcttgggcacctttttccattgactggggactaaccattatgttgtttgtgactgttgtattttcttgcagacaccccctcttccctctcttagcactgatttttgagaaatgtgaattagctacttgtaccccccgcgagccgggggtggcgggcggggacgtctgctcgtcagagtcattcaatgaagatatagccgtgttcgccaaacaggtcagcaaaatagatgttaaaaagtaaaagaaacaaaaagagagcccccccttcgccaacacacacgcgcgcgcgcgcgcgcgaacacacacacacacacacacacacggcacactttcaaaagtagccagcacgtagtcggccttaagccatgcatgttacctccaacctcagattttctctctgtctgagtgtctgtttgcagataacttaaaatcacccatctgcatccccactcaccctccagaaagcaaacgtggagagctcactctgcagaataaaatcaagaacaccacggttgtagctgctgtggactcggcggtctgagcagcctccccgagagccgtagttgctagtagaagtaagattgagctctgggcttgttttcagcttatttaattcacactgaaatgtttctgcgcgggacgaactcggtgtcaccgggtccctcccggagggttacttcctgcccccgacagtgtaatgaggcaagaaactaggaaggcgaccagatttcaaatttttctttcttttttctctcccctccctctcccctctccttctcacttgtatttagattcgcgcagaaaaacctctattttcttctaatccagaactggataacttggtaagagcggacccctatttccctcccccgcccccgaccccctacctcccacctccaacgccctcagctttgctttgagagccctgagatttctagaccggtcttcccgtgcctgcaggttggctgcaaatgtttctgtacacggacaactggtccgggacaagatcccggggaaataaattcatctcgagaggggccgggcgagccagcgcggggaaacgcgagcttttgttttttatgacagccgggctgcgcagctctaatcagcgcggggatttatctcccggcctgtcagcatgtgtgcttaaactttgcggacttcctagccctctaagtcccatcacgagggcagccaccggacaagagcccccaaacaaccagtttgcctgaaaggtgtaaggaaggcagcagaaactttgcaatgggaaaagccacagtttgagggccatttggaatatttttctgtccactccttccaaggacacatgtagtccagtgttgtggcccttttggggtggggtggggccagtgggactgagaaaggggagagccatgggggaggagagtgtttatgatcctcacttagatgctgtgttgttgttttagctagttttttttttcttaagaaatataaacctctagatggtacccagttgctgctattaagttttagtgttattgccataaatcaaaataactctatttactggtgggagggggtgggctggagatggtagagctgtggcagccagttttctgcaagccaggaatggggtgcttattgtttttgtatctttgcagatgattcaagccatacaagtattaaggtttcatctattggaattagagaaggtaatttctctagcctcttttccttttacttaccccttacccccaaacacacaggggggagggttccgaatggctgaagttcagccttctgatacatttgcataaatgtctttctttctggtaattagtgtcaaggccaatcttagcgtccatttctcttcgcagtttaattacaatttcagccactaaaactgggatcacaaacgccctagccttgtgttcattcttaataacttgctggctttgtgtaaatagttgcaattctgtgcatcccagctgatgtttcgaatgctgctctgaggttgtttcacaagttcatacctctgttgtctcttctcatcctcttccttctcttctttgctacctctgagggagaaaaaagttttattcagttgtagtgagtttctggaagacagtcttgagagcaagggcagatcagacacaggggagaggcagaaggggagaaggaggaggagcgggaaggagtctggaggaggtggtggggaggcacattaaacgttttgcagagacaaagcagagttgatagttgtgtcaatttcttgaatctgtgaatcctgcacacactccaccttcacactcaagaaagggtgtgggataacatgattttgctagctgttctataaatctcagcaataaaaacttaatgcattgtaattcaaactaacattaaattgcaagcacactggggtttcttgtgaatttttgcatgtcagtgatgcctgggacctctaggaaacctctgcacttacacttaaatattttgaggcattccttctcctttttgtaaaaaaaaaaaaaaaaaaaaaaaatcaatttgatatgtttttgtgtggctgtatgttttcccatatcaggagtactggcaacttgatttccttccatttttttttcaaagaaagttttctaaaatataccccttagagataaaaaccttcattacaaatataataaggacttgggttgtcaggcatttatcctatgccaccacagtacaggttctttggagaatatatatgtgcatatatacacacgtatacatttttttcttagacacattagaaagggatttatgataaagtcactggatgaaattaaatagtttaccttaaatgtcacctacgcaggtcacctctctaatgaccacagccccaggagcagatgaatttaacacgggtgttgaatatgttgtagcctgtgaatcatcttgtcactgtcaattttctgggatatctctattttgcaagaaaagaaagttattcctaattctggatgcgtctgggggtctctggaggacaattgccctgtgtttcccctatttggaagtttggatctcacaaggggggtggattgcacttgtcaatgtcatttatgcactcctgattatattcccatttttttatttctgtcataatgtaggtacacgaattatgtgacaatttctgccaccggtatattagctgtttgaaagggaaaatgcctatcgatttggtgatagacgatagagaaggaggatcaaaatcagacagtgaagatataacaagatcagcaaatctaactgaccaggtatgcgcttttcaatttcaacatccctgggaaaaaaaaaaatctgtatgcatattgcttgctgggtcactaccacctccttttattatttgcatatgattaagtcccttttagatacatttccatcgaaatgaaaatttttgaataatgtggctattattgcttcattaaggctggctctgggattcgacctgaagagatgagcttgtaaaagctttgctagcaaacttgacctgtttcttgtcgcttttaatttttgtctttattttatttaccctctataataatgggagtgttaactgccagtgaccgcctctgattgtaggggctttgttccggagcatttttcccccttctatcttcaagaaaagacaagtgtagggtctgcttatttcttattttattaggaataaatccaagataggtggtctaagaaagacagcgagagtttgaaatctagcaaatgctggctattttctccctgtctgtacggttcattagcctgtcttgtcagttttcctcggccgaacgcttctagacctcactgaacattgctttgtgtggtgttcactgcaagctcacccattttattgtacttaatagaaaaaataagaccaggccgaggttataaaaacagataaatatggacttttctcctccttctttccactcatcctccagctggtatgtgctctgggccctctgggttggcagcttgtggacatatcagcatcaggggcaccccggcggctccctgggtaaggagtgtgggggacctcgcaccgcctttgctctcaactgagggccttggcttgctgcaccctctcctctcctgtcttccctccaggcccttcttccgatgcgttactaagtggggacgacttttatttggaattgctgtggggatttctctctctctgtcaccccaacaccaccgtttgctcccagggtgcctctctctctcctgtggctgtatctctggattggtccaaaggagttgcaaaaatgcaatgaaagtgaaaacgtgtagagtgagtgagatgaaacagggctcagaacagttccgttgcgaattgttgcaaggcgtctagagatttgggtagctggcctgctctgcaccctcccacccttcccccctatataagtgaagtcccagtgttgtttctctttctgactcggcacgtgagtccagatttgggggaagagatcagcctgcctttgttaagccaaaggccagctactctgcaagctctgccatgatctctgttggccagtggctgtcttgtacagtccttgtcgagcgcctgacgcctggttcttagtgtcatcttatggttttcttctctcaacatcatcctcttaaaatacattctcagcttgattttctctgggcaatccccgcgacatgggctgaattcctcttttgcccatggggagcgagaaacaggcagagcagagatttaaaagtgccaatgcgccgggtccgcactgtgatctggagagttggaaactttcggcagtgtagtccattgcacagaacacgcagcgtgcgcaatcccagtgcggccccacagaagtgggaaaactgcaggcggctcccagccttggcccccgcgggcggcccgggcctcacgtctggttcagcccgccagccctggcccgggagctgttgagtgccgattctgctgaggaaccctcgagtagctgctgtggaataaaaattgcaatccaacaagcctaactggaaaatgggattctaaaagctccggagtgctgggtacataaagctatttgagcaaattacaagaatcgcttaggggcatgaatgaaatcaacactttaattgcctccaaaatgaagatttataccccattttctcaaggaatcattattttattaaagtcaaagataaaagaccaaagttatgggaattttttggaggggggagagagaatacaaaaattaatataatatcatggagctccccccttctccttccctaaacttttgttacccaattcccttcagatatgcaaatattggtatgcaattgtatcggataaaacttctcattttattgtcttctacctctaaaatgagaatctgacttctggtccccgctggttaagagtgggcttcgaagctttggctgagctcgtggcgctgttggcctatgcgcctgggctcgcttgtgtgaccccctggggctcacccaagtttcagctggtcggaggacagcaaacccaaggtccggtttggagaggggagcgcaaagcgctggacgcatgcggtacagtgccacggccgccggtgggctccactgccctggggagctgaggcgcgacgaatgaagcaccagggcgcctggtgggcgccagttctccggtctggagcctgctggcctgtccctccggggcgctgaacccctagtgcggcgtcctgggggccgggcaggaaggatggcctctccacctgtctgcgaatgcagcccagccagtttgagcctccgcagagggtgcgctccgggactgggcgcttctcgtgctgtgagaacgctgggccttgttagctcattaacccctctgtctctagggcccgttggcggcacggtttattttattttacctgttttcctcggagggcgcgaagactgccacccgcgcggggacctgggatcgacgactttgatactaggcggtatcccggagggctaagtcggcggaaatccacttgaccttgtagcgttagtcctttcttttcctttcctttcctttttctttcttctctctttcctatttatttatttattttaaaaataggattaagacaccagtagaagctgtaatcccgttccttcccccactcccagtcttccgggccgcctggaggtccctgccggagagagccactttggcgggcgcaagcctcctgggcgccctctcctgaccgccgcgctctcggctcggcttggctgttccgggctcccagaggctaggggaagcgaggggcgccaggggcttcccggcctcagcgtggggcgaggtcccggctgcgaccccggagcagagggagaggggggccatgatgctaggcgtcgaggcgagggttgagcctgtttggcttcagagaacgatgcgggttcgaccggaagcggggcgcgtgttctaggggcccttgggtggattagggggcgccaagaggggttaggcgaggagaggcctggccacccagttgctagactttaggccgcactccaggaaggagcagtcggcttccttcctaggccgcttctattgcgcgccactccttgaatctaagcattttccactccaagaacgcgttgggagagaggggagagcggagcagagtctctaggcccccagggccgcctcccggggtggccacgcctgccggtagcgagccgagattagctaggtctgtgctcgggcctcagcggtggccctggctcttcccataagcagcgggaggcagagaaatggtccctttggattacagtttttattcaacagcagctctccggggggtcctcgtctgaatctgcatttagcagctcctgggcgaaggctgtcgggctgcacaggacgccctgttgcatgttaatccagatttgtctctgacgtctggggagaagtaatatggcttgcagttatggaaccagagagccacgctcgccaggcaggttaaatgccaagtgctgccgagctcccgggggacggccgccggggctgtgcagcccagactggagagcgcagggccgccaggcctctgggatctggggcaggccgggcccggtgcgctttggttcccaagtggtcctgggaactctgatggcgattgttttatttcaaaagttcacaatgttgtttctgaagcagagtttggcttaaaatcctttaaactgaggtagaactttgacagaaaacgccctcctccgaagaagcgggggaaattcttgcaagggagatttaagctttctctttaagggaggtgtcacagtcagggatgaggcagggagggcaagaaacaacctaatgtcctgcatggatgggatctgctgctttagaagcaaatagatagggccagcgaatatttacgaatactagaaatgtccgcaattccttgtcatccaataagaaaagtggacacaaacagcgggaggcagaaaaatggtccctttgtcaggtagtttgtttttaaatgcttccatttgtatacatcttatttaaattataaatgcttcgtaggttcccacttaatgccttaatcctgaaacctctcagtccacaggacttgcaagtgataaagtcttagcatcacctaactttacatttgattgtgttgtgggtcatgtgatatagtcttaattccttttaaaatatatgtcaaatggaaattatggcaagattctctttaatgattaaataataaggtgttgactgcttgtcactacactggctaattgggatgttcattctaggccctttattacatagcaccctttgaattaaaagttagttgtttactgggtatatttttattgttactttctgattggcttttagtgtgtatttatgtgtgagtttcagagtagggatgtattgattcttaatagggacacttttaaaacattctagaaaaaacaaggggaaaaaagtacaccatagatgcagataggttgagatcacttacattggtaaatgtctctaagtctaaacgctaatactacaaaaaatcctttgcgtagcttccctctctctctgtctccctctttctctttcaatctctctctcagtggaagtccccagtgcaagttgcatgaataatggaaagcaatgatactaatgctactttgtacaaagtaaagcctcataacagtaactattgttcagtgatttaactagctccatggcagtaggtcattcaaatagcaattcttcccccaccagaatgactccattgctcaccattctgaaatatatagagtagttgttttatatagctattggtcctaacttagagacttgtattagaaaacatggagaatcttaaataatagaggaagaagagaagagaagggagaaaaatgtattaaaatgtgggccgggctttcaaaaaagtaactgaaatatcatgctagaattgtccaactttgaaaatatataaattttaaatcattatgttttcaaacactcatatgtttaagtttttaaatgtttgtcatagtcccaaaagatttaaaacacagctgtggctgggtgacaagaaaagaaaatatccagtaaaattctatactcttaaaaaacaaagactatttgtgctcccatagtagaaacttatgtttattaaggccaagtagatagactaaagtattaccatgaggcctactgtcctaaaactagcttaccttccctagcgtacctcacaggtggagttggagaaactgtgaataatgcataacaaattatattaagacacttgccataaatgaaaatactgtcaacatgaatttaaatgaagtattctcatattggtaatgttatgctttccattgcaacaacaatattttcttatgaaacataaatatgtcaaacaaatgtgaaatgctaaagttttaataaatgatcatttaatcatcaaacaaaacccaagtatgtatacaaaaacttttaaaggaaagtcggcatacagccaaattgctatagggactagcagggaaatgatcaaaaaatgaacatgaaataagacttcctgtaagaaggtctataattcaaaattatttgactccactgtcagggaaatagttgaaggatagtaaactgatacagctctcagtcatttttgttacacagtcttaaatgtttgcaactgtagcattttacatggccttttgtggattatgatatctgtcatatttgaatcaaagtactactttaatttatgacataatcgaaacaaaattttttgccatttctcctgagtgcaaaaaaatttaagaattaaataaaaattatgggaaagtattcttttacaaatgaagaaaaatagaatgcatgtgacacagtttatctgacagttgtgcggatgttattatagatttaaagattttccagatcccaagtaaaacaacactgctctaaatcccgttgggcttgctcttcttactaagcaggaaatatcagaatgtaatacctgtataaaaagttctgggctaaaacatataaaatacagtctcccaatttaagttttaataataattacaaaatttgatttttggcatcctgtagaattttgaatattttgccatccttaatgtatacgaataaaccatgggtgtctaaaatcaattttgaaaagttcaagcaaatgagtgtgtccatgtagtgtaaaagataaaagaacatcttcactgtatctttaatttaacatgccatgatttcaagattataggaatttagagaagctttttggagtcttaaacagactctccaggaagtatacctacattggccaattgctggaatccctacacttgtaaattggacatttgaataaatggtataaaggatactatgtgaaataagtgagaatatattcactaaaatatttgtcactagaatccaattatgatcaatgtaatgcattcaagtgcacagaattaaagcaattggcaacaatttactagactttcttcaaacactcttgctaaatagcatttcttaatctagaaaatatgttcttgttaaaggaaaatacaagagtgcaaatattttccaattattttatattcttgacttcttggttcagagtttctaaaactgactaaaacatactatcaagggttgattctctgatggaaaaagggcttatttatacacatattgaattatacacctgttgtttattggtgtcatgagtatatacaatcaaatacaaattacagctggagttgtatagctgtatatcaatacaattgaagtttataatgaaattgacacaaattatagctatatatgttttaagatataaagtaaccatattatggtttttccatgacatatggaccaatttatgtggcatacgctaatggaggacaaataagttgagcaaagaagttttaccttatttgtaattctcaaaaatacatttctacagtggattcttcccttgtacttcataattctatttacaattaatagaatttatactcacgaagtaaacaaccttgagtgtgtaatgttatgcttctttaaaaaactcaaataaaatcctggcatgcacttatagtctcagctaatccagaggctgaggcaggaggatcacttgtgctgaggagctgccagcttgggcaatataacaagaccctgtctcaaaaacaagaccaaaaaatccttaaatgaaatcatattattcaaaaaaaataaaatgcctgttattattaataagtttacgaagtgaaattttaaaaatggccacaaccttatgagtttaacaaatattagcaactgttatagttgtgctgctgcttttacgttttaaccaaatacaaagtcttacattttacaatggacttaaatatacattattttaactcatttagaagatatcagtaaataagatttttgagtgatattagaattactctaatatcaatatatgacaacattctagtatcaatacctggccacataagctagcttagaatgaattgttgcttgtgaatttccatttctatagaattttccttacactttacaatatggtagcatgtttattatccattaactttaaatttctgggttgttggttattatttagaaagatagaactatatctctttctttttctgatcacttttttttctgccctttggaaaccttctatgcctgagatttgaacttgagctagtttgctaggtctcattttcctattgtagtgccttgtgggttattacccatatgtgggtttgttttcgtgagaaaatgaagaatgttactcacttcaaaacaggaatgaatagaggccaaagtcatcaaatattcccaacctgtgctttacaattaggtgaaaaactgaaaactgtgattcttatttgtcttccctagagctgtgaacacttggtataaagattaatattagcccctttgtgttcttcctctaaaagcctaaatgtttattttcagcaactgtattcttaactgattgtccatacttggtcccagacctccataatttacattttattctgaatttgcattcatatcacatcccatagaaactctttaaagtgaagtgtgtttatgactattatgaaactctggaaaatgaagtttataatgaaattgacacagccgtcaaaaggacagtgaagagagcaatttgactgtacatccagagtttccttatcccatctcaacttgtaaaaggcttatttctcttcttttaaaaatattagaagctgaatgaataagaatttctttgacaataaacctcctcttaatgtctccaaaactatttggatgtgttttcgaatattaacttaatttgatagacaagatataattaactgtgacctatagtgttttctggtattcagagattattccttagcaatttgaaaacttaatttcaaactacatgatgtataatttctgaaattctaaaggcatacttacactatttacgtgaagtggagtgtttgtctacagagcttcaaaatggagatactttagaggtggaggaacaatttttacatacaaagtcttggcaaactagctagtgcaggtgggctatttttggaaacttttcaatatatagccttcctatatatttactgcaatattaaaatttttcttcctgaaggaaaaaaaaagctctgtgtttcatacagaaactcgtatatgacattttaaaccttcacatttcattgatcataaaatccagccaatatatatatagaaaatttgaaatagcagcaaataggtaagatgctatttgctattatgctacaatcagaacagaaactttagcagtacaattaattaggcattttgggtttagttgcaacatttacttgaaagttcccaccagatctggagttgttttataatccacgcttgagaatattttagtgtaaaaaatttgtgataaatcaccattgaacattacttttatttcaaattgctccttcctaagagatgtagtgtcaggagtaaccaccctgcccttcactcttgaacatataaatgtattatttatttacattctatcatatacattatttatgggaattatactataactctacagagcatatggaattcatcttcatgagataagggtggcatctctgccaatgtggtatagccctaagtagataattaaggattaccctcagactacagataaatattatctcttatagagtcattacatgtttatatttcatagctccagatgcaaatgtagtttgccattttcattttaattgtcatagttttcttggctctagcttctaacaaagagaaacaggaattttacatttggaattgatcttgatgataaattaatatgttcaagaaaaagaaagatattcagttgcagaattatttaacccccttcctttctttcagcctgctttccctgtccttaatgtgttccaaaattttctgaagaatgttgttcataaagtttgtagcactgtttgtgtatttggtggcttggcctattgtttcattatattttgggtttttaaaagctgtgtttaataacaaaataagcaagaaaaacatctgagttattatgtcccgtacttctttgcacaaaataacagagagatacagaatatgcttgttctgtgcatatgaagtgtattgctagtgttcaatttttttattctaataattattcaaaggcagtaacaatctgcatttaagtgagtataaacatttttattctggaatttggaatttgcagcaactcaattttattttccaaattaccctgccatttcaattaggtgcattgttcttcactctactgttgcgacattctaaaggtttgcttgccatcctaatagtgaattgtttgagtgtttaatatttattgagggcatgtaaagaacatgccaatagaaaaataggagaacaaaacattgacaaatcaattatgtggcttttctttgctcgtggtatactttcaataatccaaatactctgtaactgttaaatagtatgaataatctctagaataatagccttgggtatggctgaagaatgacattctgattaactggaattccttaaaaagtgcacagtgcaactcagcatcttacttctggaattcacagttgctttggctgatctcttagttaagtatcttgaaatatagaaaacttgaccgttgtaggaaccagaaactcaaattaaatctcaagatgctttgagaaaggcctccctgattattttacccaagataaataatgaaggaagggaataatcttttcccaactccaaatttaacgttgtcagtgggcttaaagatgcagacattcttgaggaatgagagacacttaaaacacaaaatgttgtaaaaaatataaaaaatcagaagtgcttctaaagaaaccatagggaaattagaagataccctattaataattattagtggaaatcagcggtaaatataaatttctgtgattctgttattcaaagtataatgctatgaggtagtagaacaaaacaagactatatcttggctgaatttttttttcttcttatgtctcaattgtgtgttctctggctcgagagtttagaagtagaaaagagaaaacttcagaaacacttgagactaaacagttaagtgtattgcttgtcatttttagttacacatcctttcaggaaggtggtgttctaatgaacaatatacaatttagagccagagcacttatatttgaatctagactttgctctgagagggcaagtcactgcaccttgacgggccttagtttaataatctgtaaaatggggatagtaacagtacccactttattgagttactgtaagaactaaataaaagtgcatctaaaacatttagagtagtaaatccccaatgagcacttcattacattatattttatcttcttgcttgtattctgcctaaccttcaaaaacaggaattgggtttatggaggaaggattgggtgctggttgatggggctgttgttttatagagtattttatcatcgtagagtttaagaaaaatatcttaattcttattatgaggggtcaattttattctgatttcagcatagtgtaaaaggagactgaactcagatattttactgagatagtatagtgaatcactgcagactcactcctagggtaaaattcaaataacagttatgtaaggaccctgtgctaagtactttttccccacatttctgaatacaaatacttcatgctgaggtcttgttgctttcgggatgttattatctacttttactcattatacaatgttttctgcattattggatttttcattttttaaattttttttgctaggagccttgcctagaaagtttgtggttgaagttgttttatataaaacacttttaagtttattttatcttaatttgtttgcagaacaaggagcactgatactaagttacggatgtaaaataaaacactgggaagcaaacagtcttataaagaggattttataacatcaggtatactggcatgtaatttactgattcttctcccactgctaagtagaaataatagaaaatgatcagagttcagcagaaaactctcaaaagataaatgaataaaacagattgaagtatttaggtatacttatttggaaatatagtggtatcagtggattagggtttttttcagccaaacatttaactctatgaactacaatttataggtatgatttcaagaagcacctggagtcattaaagtcagtaaatataagaatttatttttattaatagcatgccagttataatacaatggcatagaaaaagaaaaggttatcaaaacatagatacttttactaagaattttagcatattgaggctttatcttctctcttcttaagatttttctctacaagaaactggtaagtagaatttgaacattcagggcacttgaataatttctattacttaccagttttgagaaattggcatttatggtcaattgccctttggttgtaattattccttttctttgtaatttggctgaatgtaccacatgtagaaatctatattatcttcttagaccacagtagggtcaccatgggatgatgttagcattgattgtcaaagttaaagaattgggcaaaaagtatcagtgctgtcttgatttcatcaggaaagcctttggaatattctgagtgttgttttacatctgtagacctctgcttagcatagttgattcacttgtaatttattgggtaaattaattcaactgtgcaggttaataaattcctgaaaatgttagagtggagacctaaaagacaccaggctgttgaaaactagggttttaagcagcattgggaaagtgttctgtggtattcagtcctggcttcctaaggtccccaccctcactgcctgccatagcagcccagcgcctgagtattgagaggagaatgaagcatgctgattgcaggacagtgggcaaaatctttaagggatagcagattttaaaaatatatcttacagccaggctgctttaaattccattacaatgtaattaaaaaaccattagattcattttttaacattcttttgccttatgccttacgtatgtgataggtgtgtgttgcggtgtgtgcatgtgaacccatgtgcacactcatgtctgaacccaggctttagtgatttctgaagcttgaagaatcacctggtagaaaacttttcacttaaagatgaaattactccttggagaattttcaccaaaggcaagaaagcacaaaaattcttttcctcctctctacatgcctcattacacagagatagaggattcaatgtttgaaaaattatcatttttgtaggttttatttgtggtacgtgagaactgggaaatatggaactctatttaacagatgctatgtctacctatacaaactacccacagtgactatcatatgatttttatacacacacacacacacacacacacacgtttatttgcaagcaattcaccagagtcgcttagctgttaaggtcttagaaatctgcctcatttgatgctgaagtgtacacacttatgctgtgtataaaaatactggctggcaccaatgtagtgagtgcaagacgtaagagatgattacataaccaagatgcatttctagattaaaagttcacaatggcaaatatgacagggctggaactgtgagaagaggcagtgtggtgtgttggtgaaagccacagattctgaagagggatgctggatttccattgtcttaccgctaatttaccatctgccctgagtcaccagaattacccttcaggcctctattaagtggagtcataagcacattttatcacagcattaaaaaagggttcaacaagaaccctggcagggcttacagacttggcaaaggtaagcgagtgagggaggggcagagaaggaaatgagcaaaaggagagttggtggagaaagtggataaagtgtgtgagggaggtagccttttaaaaagttggcctctctgccaaagatgagtgtgggcctccatcagggagtgcctcaggcacctaccactattttcccagaaccagcaattgcctctctgcattttatccacttttcagcagtgcacagtgtggacttagaaaaggtttctctaaagtatgctatttcacgtccatatcattcctcacaacactttaatgtggcccctgaatccacagcacgtgtgcacagtgaaatattcatttgtgaatgtttatggcatttcaaaacatctaaatgctcaaaaggtaagagcagttttcctgtgttaagaaaaaaaaaaggcaaaacaaaacatactgcctaaacttgttgtggttaaatgaattttgcttagtgatttctagggattttttttttttttttttagaaatccacataactttttttccagaattacctgaatttgaaattgagtagatgtagccccaaaggagtatgttttgagaggagcaggctgtatctagcaaattataggtgctcaatacatggtagttgagtgggttgaatgattatatgctatgttttggttatcaagcagatacaaatgtgagccaccaagcatttcagtacgagtttcagtatgacaagactttaaatactcagacataaaaagccttctcagcatccccattccccagcttcaggtacacacaggtaaatgtgtattgtttctcacagcagctcctgtgccccttctcttctcctcatttctctgcatatggatctctctctgatccctttcctcagatggtatcattgattgaggagtgtataagaaatgatatttgctgaagtcatgcacctttaaggatcccgaaaaacactgtttagacagaggggaaaagtcaaggggagccgggctaattagatgcacccccccagacagtgtgggatgctgacatacagcgatcccattcactgtgcttcatggaagagcacaggtgtgcacatgggcacatacatacggacatgggcaagcctgccagtgtgagtgtgcgtgtgtatgcctgagtaccatgcacactggtgccttctccatgcggacctggagactgtcctcacctggagataataaattgttcacttttggagacaagccagctctttcaggccactagagattacttactaaagagaccctggtgatttgagagagtaaatgtacctccccaaagagaaagccgcctattgacaggtgcagactgacttcgaattttgtacactgattatttcatcagtttctacgtagctgctaactgacaccttcacagtaaagatcatcagactctcaattatccacctttttgaatgggaccagtagtgtagaagttttgaagaaaaaaaaactctatttttggttcgaaaaaaatgattctggcatcatactgatgtggtgaatgactgactgggaagatgtgtcaagatgctttgtatactgtaaagtgatttataaatattaggcatcgaattaaacttgatgaggtggggaggaacaaaccacctgtaaaaatcatgttattccaaggtgaaaataagatcagtttgcattccctgagcacacagcagctgggagatagcacaaagcataccaagctgtgcacgaagccagctcaggttaaccattctttccagaaggtctatacactgaatatacctgtatgtagataccccaaggttggcttaggtcaacttatgttgttacattaagaactatagaagctgccatttattgagtgcttgctgcatgcttgacaatttacatatgttatgtctgcaagggagtactttttatcctcatttacagatgaggacattaaggtttcaagaggttatgacttacttaagaccatgtaagtggcccaatcaagtttccaacaggactagctttaaattttctttcttttgactgttatgctacaactgagtattaatctatttttatagtggtgtgtgtttgtgtaagtgcaagtatgtgaggtatatttaaattgtactactcttttttagatattttgtgatgtctctcatatgggagaacacaatgccaggtgacaatttaacaaagattccatatgtattacttaagttattcattcaaaaatatatttgtatctaatataatatcaacattttcctaggatggaggatataagcataaataagatgtaggccaggatttcaaaacattcatagtgtagaattgtagacaggcacagcaggtcatcacaaagcaaagagtgaaaggctagaagtgtgcatgagatggtctgagctctcagagcagcagagcctcactcatccaggggttgatgtgtatcagggaaggttttctaggtaaggtggtatctgggctgtgccttaaatagcaagaaggagataatcaggggctggggtcaggcagggcagagcaaggcactgcaggcagaggagaaggatgagcatgggcctggagcaataagcagcagagtatttgtgagaaatcatgtgcaatgggatgttgcaggagcaaaagaaacaaggagaggaatggtcccttggggagattatgaagggctttgtataccagggtaaggacctcagattgtattctgtaggcagtgaggagcagtccattcattcaacaaatgtttcctgtgtgccagccaactgttgggcactgtgattgatagtcaggatgcaatggtgagcaaaactgacaccatgtctgacctcacagagcgtatgatctggtggaatggaactcttttaaaggttgggagtgatgagggccttaacaagaacagcagtcatgaatatggaatgggggagatttatttcagaactatttgggggtcaaaaatagacaagatttggtgactgattgaatggggaggtggagagagagagatagagagagagcgtatgaatggctctcaggtttataccacaggtggaggatgtgatacctactaggacacggaataaaaaggaatgagtaggaagtttggtggagacaaagagtttagctttggacttgctgagttgaaacaagtccactttcggacttcttgaggtggatgtctttgcatggagatggtttcgcaggtagttggacatacaagtctaaagaccaaagaagaaattcagacacacacgtctggtagcatataggaaatcaaaccactgtggaggagggaattatccaaggaatacctggaaagtgataagaggtcctgacctctgtccaaatttaaggcatagattgaaaaagagtgaatggtagaagaaaaaaaagtcaccagtggtaactttattcaggaagccaagatagtttttgaagttgcagtttgtttgttgggatgttggtggcatagtgactaatgaacaattcagattcattccctaagcacttggtgcctgctgaacatgagccatgcattgtgctgagctaggaaaggagaagacagagaagattaagataccattctcactcatggaggagtcaggggagctcattctttctattttactaccagatgccagtaagattgccttagagattgaaaataccatacatggaatcagaaaaaaccccaaacaacttattttgaagtgttcttaagaaacgatagaagaaaatgggagtgttctagctgtcaaagagagaagatatgaggagaatcatagcttgcttcaaatattttaaatggctgtctcttggggccctagaactagaaaaaacatgagcaaaaattaagttagtttatatattatatatcgatcaagaagaacttactgatggagtgcagtttctagctgcctgcctccatttatgacaatagaaatagtgtctggaggacactggctgtcaataacaagttagagtgtacattcagtgatctttcaggtctttccagcaaaagatttttttttcccaacaacttctttgttgttgttgttgttgttgttgttgttcttgttgttttgtctagccctgtgaacatctcctagagcagtggttctcaaattttgagagcactgtatacctgtttgagaatctgataaaaagttttgaaccctatcctttgggaaaaatatgcaagtatccacataaacccaaatattattccaacaagaccaccctaaaatcttccataggtgattctggacctcaggttaagacctcttgtcttactggatttccaataaatgagaacgcagccattgcttactctgaaattatatacattgaagaaaaaagcctctttgggacttaatttaaaaccatgactaaggttttttatttatctaatgccatgcattcttgattttattctgtcagccttacattacaagtggccccaagcaactcacaacttcacagatatgtatgcataatcagatgcacatattttattttaaaaataataatgatgttgtttggtgtaaccgcatatagtcacagagataggttattgtaactgaacttctctgtccatggatttggggggagttcgttctgattagggctgtcttacatatttatactagaagagttcatgagctatttctgatacttagactttaatcatgcttaatgaactgaactaagcataattcttgttctgtttttgtaactttgtggatttcttctaatgctcagtttcatgtgactactcattcttaaatgctaatacacaaaaatgctaattcaagaaaggagcacaaaagttagatttcacttcagagaagtgcattcagtattcataggccttctggaggagcaaggctgtgagaagaatgatattaggtgaaaaatattggctcctacctttggtgaacacacaaatttaaacatataggttgcacaaaatttggataaactgaggtggaatccaacatttcttgcatgaattcctgtataatgtggcgatagctgtgagaaaagaggagcccagcatctaaggcccaacacaatgaaaatgcaatgaatcggaatgcctcacagatcatagcggaatcagaatttccagcaaggaaaatcttttcatggtgaattaagtggtggatgaagaaaaatggtgatgaaaaaaggtaggcacagatcacaaacactgggctcagggctcactgctgaagatttaagaaccttagctaaagctatgcagaatagaatgtggaaaattgaatttactaaacaattaagcattgaattaatctacatcctgcacagtagaaaagtgggggagggagcagagcagagctgaataaatcagtggagctcattaaaagatagtgaatatatcaggtctgttgtagcataaaggaggacagcttcctgtataacaaggaataattctttggttctaagtcacctttttggagtcctagtcttaatcagattaacaaacatgcttctgatgaggttggtctgtggctctgtattttagcttgttatcgctagcttttctattaattaccagtcagatcaccagtcaacaatagtagtgagggacaacataaataaaatgagagtgcccaggagatgtcactcgcaggatctcatgcatcctgaaactcccacgggttcctgcagcctcccacatgtcttgctggtcttttgttcaattacagttaatgcaatagtttgccattttctctttctaattatattttcaagtgggatttgtagcacatagaaaaacatccttttacatgtcgaggcaccggggttttgtgcctggcattgtctgtcccctgggtgctgtaccattctttctgcagagctctgaataaacaagtcccccttttagagctgcagttgtacaaactgaaaatttatgcattaactgtttgcattctgagcgtgtgttccagattacgtcttacagcattcttctggtatgctgcagaatgcgtgtgtgcaaaaagcacttctttcacagttcacatatctttcaatctcagaatcagcagatcaattagcactgtttttgagaatatgcataatgggtcatattatacatgagtcaaacatacaaatggcatatctttctatgactttattttcatttttcaggctgcattaatcttctggccaagattatagaataagtgacagtgatgcatcttgttcagaaacagtgactctttccctttgattcctatacagcatgcctcttagatgggatctttacttttctctccctgggtgtctgagacattttgatctcctcagcccttcttatcttctccagggtaggaacatagttttctagaaataagcaaagagctctttgatttcgctaggcatacttaatgatattggaagggtcagcaaactctactactatatagtcatgaagcctgaccttatatgattgaaatgatgtatacatattttacatacgagatgatcctgttttcccactaataatcttgaagataaatatcacttcctagtgaaggaccagctttgtattttgcatcattcctactgtgcaggatgaccagtgactcatgaggctgtttttgaaagctagcactaaaagctaattaaaatcttttctggtgataaagagagatttgggagaggtgtcgccatgattgttttcctcaagaatttattttacagccaatttttcctatctgaatgttactttcaaatgcacccagtgataagaagcaacatctgttttccgttcaatagtacaagaaggctctgcatggggctgagtgtacacagtccatgtgaatctattgttattctcattccttttttgtgcctatgcctggtccatttgccatgtaccatccggcaaacagctgacacatactagctattatggacccaggcctaattgtgaggtcttaaaagctctgccatgtttgtcttctaggatgaatcagaggcccctataaaccacagtgttatagaccaccactctcattttgcatttccagagtagcagactgttgtgccagagggtttgttgatgttgaaaatatagtcagaatcagtggcggcattttgttttcctctttgcctggaatgtttttgttttccttagtaataaagcatgcaattacttacagaataactatttgtagatattattttagcttggaagcagaaactggcaaattataaatgtgccaatgcagctctgagctggaaccatggttgaagggggatgggaaaggtggcatggttatgtgctccagccctccatggctttgtcattatgccatgggatcctaccaataagggttcacagatgcctcttatttgggtttctgatttgtgcccccacagccctcttggaacagagatcatgatgacacggcatctactcgttcaggaggaaccccaggcccttccagcggtggccacacgtcacacagtggggacaacagcagtgagcaaggtaggagagatgttattctcttttgctacttgtttcatttttaaggattgaaaaatcagaaatgtctagtgagttactaagtatacagtttttcctagaagataaaccccctttaacttgagaatcagctcatcttattttattctctgaccctgctcttctgtgctattccagctgcttaactgtctgtcacctggccagcttcataaaacagggtagtgaattgactcagggcaagattagagaagtagcttagaagtttgaatgtgaataaatagtatgccattcataccctgctatacaaataaaaagtattattactacttgccctcagaggcttttcaagagctcatgaagaaacatccactaggattccaagttaatgatgtcttaggatgcttataaggctgtgagccctttagtagcacatgctcggcttccctctccactgggttgaagtcatttttttctggttttacttatctgaatctcctaagtgcttgacttcattgcaaagccagactaaataaaatttaggaagacatggaaagataacaggttaatttgtgttgtcctgtgaatgcacatacctatgtgtatgtgagtgtccatggattatgcatgtttgactataactagtaggaaataaagtttaaacatcaagctagtcttcagcaaaagggcgaattgagtattcaaatgtctgtactgcttttcatgagagcccgctgtgtggattttgtgttccattaatgcaattaaagtttaaaagagaattctttatctgaatataaaaaggctgttttattgaagttgactctgagcccacagtaggtacatactttaaaatctggttttatgatcatgtttcactggagtgctgttagacaacaaaggaattttgttgtctaacttagttgggctctaccaattaaaattgcaaagtctacaatgaatttagtgtgattaatttgaaaacaaaaacaggaaagttaatttttttgaggcacatatatgctgtttgtactgggaataacttcaacaaatataattttaaacatttgagacattttattgttcaaagaaaagttgctgacttcatcacaactataagcctagtaaaaacggagcccagaatagtaaactggttcagagctgagaggtaacctctgacctctgacttttactggaaaatgatatgcagcataaatccaaggggccttttttctttcaagtgtgtgtatgtatgtgttatggcgttgctgttcagagtgctatagttaaggtggtgtcagcactttcaatataaagccctactttcataactctacttacactatgagttttcaaaaaggtgtaaatggaatataaattctttttcctgtagcccaaaattgctacatggggtcgcagcctagtgtttggcttgtttctttttctttttcatttcttgcttttcaaaacttatatcatctgagaataggtagatagttcagctgctgcattgaaggcttgcaaactgctgaaatgcacttgaatttaaaattgtaatgcatctgttttctcaaacatagtatgataagaggattttcagatagcaaatgcccaataccagttcttcccctctgacatgctgtaacaaggaattaggagtgttgtatgctgcttcttccttcaacaagtgttctccaaaggcctatttaataatttgattgtaactaggaactacatattattcacattactttctacttataatgtttcttcctatattttttctttttatgttttatatttgagtccaatacctagttgtttttagggcagtttcacataaattatcttatttgaatgatctcagctgaatcatttaaaaacaatcctgggtagcagagtaagtgggtctatccccacttgacagaggagaagaataaggtacaaagaagctgagtgatttgttgaggtcccagtggagtgtcagacctaaacttccagtttcccaattacttaaataaggttcttctcatcagaccctctttcctcatctctctactaaaaaactacagtgaataacttccactgtcatcaaatagaaactttctgtgctggtttcccctaccccacctttctgtgcttgataacagaagctgttgggagccccaccttcagtcttatttgtccttccttgtgggttttctttggcagttgaatttattcctgctaaatgcagaatgatgcctgaaagtgttgctgcaacaacttatgcacacttccatgccaaccgtcacccttctaaacctttttttcatccctgagaactgcagagcttggtctttgtgcagccttcggattaactgtgcacagtggcttttccatgttttccctgtttgccttttctggcaggcatggatgtgtaagctgtgccagcatttggcctgtagtacatgtcctaaatagttatttacacagtttgagtccattttagtcaactgggtaaataacagccctcttcaaaagatttataaatccataaatatgtctttatacatacccaatagacagaaataactcaatctgtcaagaacatatccaaagaggtgtttcccccacagacaggagtaatacatattttaaaactttctctgacatattatttttactgcatttcttttttcctcattccttttccatttttaccacttcattatggcacctgtggttaaaaaaaaaaaaaagaaaagaaagaaagaaaggaaagaaaagaaaacaaaaaagaaatcccctaggctttagccctctgttaaataaccttatctgctacacagtggaggcatgtaacaggctatatatatatacatctcaactgagtcctattcttttgaacttccaaagtagataaaatgaaataagttatgcaggagattttaaatgttctaagatttcaaaatacagtaagagtttctggttagagcttcagcaatttggggaattttgaatgactgataatttgctgaattagtagctgttgtgatcagtgaaagagttttagtacacatttttacctaaacattaaaaaaagaaatacaaaatccatggctgggagcagtggctcacgcctgtaatcccagcagtttaggaggccgaggtaggggggggtcacaaggtcaggagttcaagaccagcctggcccacatggtgaaatcccatctctactaaaaatacaaaagttagccagacgtggtggtgggcgcctataatcccagctactcgggaggctgagccaggagaatcgcttgaacccaggaggcggaggttgcagtgagccgagatcatgccacagcactccagcctgggtgacagagcaagactcccatctaggaaaagaaaaaaaaaaatccaatcgtgggcattctaaagagaatgtacataagatgtgtaattacaaaaatatcaaggtactattattcagggatttaatgtttattcgcgatttacacaatatatctttccctcaattcaaattatttatcatgatgaccctttttatgatatctacttccattcaatattaatacttgtggccccttgcaggagattgattctttaatagtaaagtccttttcaattggcatttaagagggagggcctcacatctgtgtttggttggggattctgttgctgttgctacaacattgatttttgtttactccataacttcctcaaagtacttccaaagataccagattgaatccttattttatccctggcaattacttgctttattttcccatttcacaggagatagaagtaatagctcagaaatattgaagagtaactctcaaagtcagcttcaggatcttggtctcttggctttgtagctgctttaggatggggtgtctgtttccagggctgccaagtagtgtctcataggtacgggaggtacatgatggcagagacgtgtggctttcgtgtgtcttttgcatcctactgtgcatggctgcccgcctaaccataatcagagcctactctaggaactgtgtgttttggagtgggagaacttcaagcaaattgggtgcctcttcccctagatttttactgtttccccaaaggcctgccacagccactctatgcctcttaagcagcttcagctacgattgaccacatttttgagtctggacaggtctctgtttttgctttaaagttaagagagctaaataaatgatggtaaaaagataataaaatagaacatgaagggctgtcagtcagtgtaggtatttccatcccctcacttttcaagtgaggtcacggaggctcagagcgataaggagacttgtccaaggccacacaccggctggtgctcaagccgggacttgaacccacgcagtctgactctagagcccaagctcctaactatgacatcctatttgatacactgttttactggagaaacagatcatttgacagacattctttctgttagcaatttgacaactctttccccagttgtctgtactgaacctggcgctgtgctccgtaatggtgacctagctgtgaataagatagaatcaccttaaactcagaggggtaatgttctgttggggagggagaacctagttttgcatgctaagtagaatgatgaatgaagtatttacaaagggagcatgatgactgatatgattcattggtattatgtattaagagcctatatcatttcactcattcaaagacttagtgaattaagaatagaagcatgggaacaagtaaagatattgctcttgcagaacattttccactgaaagctcatcatattttcctcttttgtgaggataaagaaaaagtattatttctacatggaaatttgatgtaatacatttcaaccctaaaggcttttaatgattgctggaatctctaaaacccacttatgaacttctcctttaggaggcaggactcagaataacaatagtaccacttaaaaaaaaaaaagcaaaaccagcatgccaggatgtttctttaaagaagattaatgctaagcactgcatttctctatcataatgtatcaatagttgcagtgcctcccactgccccatccccctccacaccagcttttgtgtgagtccaggcaacctataggcagaaggcaattccatttattattgaggggactctccaggcagttgttccagacctgtgaagccagcaggcagagcggcctgagagggggtggggagcaccgggcgagggaggtggggaagggccacattatgttccagatgactgagtaacgatttatatatcactcgccttttttacatgaagaagaaaagtaataacagcccaaacccaggcatttgaaacagtcagctgtccgatgaataatgggataggtgggaaggagcgctctgattggatgtcttaatgagcacatttcgcacagagtttgggctgcagttccccttgacctttgccctttattgaccaaactgacacttcatttttcacatacttccaattatggctcggcttaagtgttgccctccctcctttatttctttcctatggacaacttgagagtggttgaggccacagaagatattttaatttgaaaaactaccgtagcgactcaggttcaggatgtaatctgaaactgctgtcactgcagcttttcagctgaaaacacaaagttaatactgcttgtttctagacaattttctttaaaaaaaaaacacgaaaaaatctaacatattttacaaacgaaatgataacctaagaaccttgaaaatgaaggaaaatggttacaaacggtaatttttattttttgttgtttcatttgtctgttggtcacagtgacttgaatgatctctatttgttcacacttgcttcttaagcctgtacctctccagggacttctggtatttcaatggcactgtaatgattttgactaatacacttttgggaggagagaaaagtaaaatataattgtgaccacaggccttagagcatcgcagccctgtgtgttcctttggttatatttaatgttgacctgcaaattaaagtgtggcctttgcatgcagtggcaggcagaataggaaaatgatttcctggtgggaaaagtcaggtgtaaaaaagaaagaggaagttattatgctccacaaatggccgttatcaaaaagtctatattattaacttatcaaacatgttgaatgagatgtagagacagagaactgttttcccaagaacaccctgtaatatactcacctttccttttattgactcatcaaatgtgagtaacagtgttctggtttccacctgcttgacttctagcatcatgaaatcaggtcatcttaaagaaaaataacttcatcatctaaaagtagtaactatatttaggggcacgaacttggccataagcattttcatagaaagtgcctcttctcattattaggcaacatcaccagtaaacttgaggtcattgtttttcatcttaaacaaccgaaaagtgcatttgaaattatttacagccgagtagagatattcttcgaacacagaagtatttatctgaaaagtggatgaagtgttatctactttattatgtagccctctagcatatctgtggcatatttttactgtaatatggtaataaaagaatatgtaaaagacagacaaatgttctgtctttttctgtaaggtgacctctgttaccaagtaactgctttacttatgagcttattaaaaactcaaaaaatgagcttttcatagttcacaggcattgatgtgaaaatgagctgtcctgtgagtagttttcttgatcacttttagaacaattgattagccaaagagctcctgtcattagttgacattgactgatagcaatttgtcacaagctctgaaggtcagctagacagttggagtttcagcttgtctttgattgacctttactgattccatcctcatgtgattgggtttgaatagttctgaccctcaattggaaaagacagggcattagtcaacagagtcatttcttatattttctgttgattgctcatttttatttatgtgtgaattcatggtctggatttcttatcaaattttgaactctcatttttgaaatttaaaaggtgcgatatttattgtgtgacctgtaagtcacaattctgctttccctttggtttgcacacttgatttgtgatgtcaatgacgtctgtctactggccactgttacctgtgcaggtactggagttttgttgcaagtgatggattaaaattttgttgttgctgtcattttttaagaaataccaactccggtgtgacttgtagcacatctaaaattatacaccaattcttttattttcctagaattgactacttttgtctcccaagactcatgcaatattttaaaataagaaataagtagtaaggaagtatatgaataatgatgttgtgtcagttcatcatttagctctgcagccagaggcatgaaaactttttaaaaagtatcttcttttcagtttcactcagttggctgtaaattagagaaagctcccctagctagaagggcattcgcttttcagtgatagtggaatatattttctgttttcatggacctggaagttaattgttcataatattcagttctttcttttcaaaactgtaaatattttccaaaaatacatcacatatagagaaatatgttccacatcatattaataccatgcattgtattgttttatgtaaacgatgaaaatggagatattagctttaaaaacccaggtcttaatctgtaattatttaattcagtttttatgtaaggccttttcattctcttatcctttctcaccttcccttcttctcttgagtctgcattgggttttaaactataagcaataacttgtttttcaggccagatctcccaggcattccagggccaccacacacagcctggcacagctcaaacatgtgtttcagtttctacccaaggaaataaataaggagagaattcattgtttcaggtggtagattcttcacatggtgtcattcttggcaaggcagaagtgaggaagttaattttagggaagcatccatttaatgtagcccaaggagataaaaagagtttagaattataatctctcctgcagatgagccaaaatattatcatgagttgtgtttaagcgggggatgggaatgtaaatttatacattctagtcaagtcatcaaaaatagattaagcacttactgtgtgccaggtactctgtgtgagctataaaaatgagtaggtcatagtatttgcccttaggaagttcctgtgtgctaccaagaacatcaagcatatcaaagtaaaatatttgctaaatattggatattcttagggagccgtgagtgtatttatttcacaacatgccaatgacccagacatggtgaactccgtggtcaggcctgctggatgaaacacagcgtggtgggtattaggttcaaattgcagagggacagcactaccttggtaggtgtagacgttcagcatctatggggccctgttaggtggacttggctccagagcccactcttggaaacttggtccagtccttccacactgccatgagccagccagtgcctctgctgtctgaaccattggggtcatcattgtgttcaccgccattagtcacctggctgctgactcagattgatcttcttcaagggaatcttgacattttgaggaggagaggacccctttggcagtctggtgaagccaatggataccttatcagagtaatatatttattaatgtatcaaataaaacccacaggactacaagggcagtgaattgtattaaaattcaatcttctaaatattttttaaagccaagttgtaatatagtaatataaggccgggcgcggtggctcatgcctgtaatcccagcactttgggacgccaaggtgggcggatcacctgaggtcaggagttcaaaaccagcctgaccaacattgagaaaccccatctctactaaaaatacaaaattagccgggtatagtggtgcgtgcctgtaatcccagctagttgggaggctgaggcaggagaatcgcttgaatctggaaggcagaggttgcggtgagccgagattgtgccattgcactccagcctgggtaacaagagtgagactccatgtcaaaaaaaaaaaaaaaaaaaatatatatatatatatatatagtaatataagtgctctgttaaataggcttaaataacaagatctactagtaattctgttgtctgctgaatttttgaagtagtgataaatgtaagtcatgttttaagatatttataacaactatattgtgatatgcaaatatgatttccgttgggaacaaagttacaggtcctgctaatagttctgtggtttgttacttacttacatacaagcatgaaggaaatgctaattctaattgaagttattgataataaaaatgtaattttttccccttctcaagtacatatatcccctgaattctaaccatggatctcccttgaggaggtgtctatatagcccaggttaacaacttctaaacttaagtgtcagaagttaaataaatgggtttggggatgtatagccatcccttggtatcccccagggattggttccaggaccctctcccctcaaccccgcagacaacaaaatcttcagatgctcaattccctgctattaaatggcatagtatttgcatataacctatgcacatcctcccatatactttaaataatctctagattacttataatacctggtacaatgtacatgctttgcaaatagttgttatactgtattgtttagaaaataatgacaagaaaaaagtctgtacatgttcagtacatatgcaatcatccattttttttttcaaataccttctatcctcagttggttgaatacgtggatgtagaacacatgcatatggaggtcttgaccttaaatcatgccatccacctaatcacttgttctccgtactcctaccctgggacatcaccctctgccccgcagtgagcatctaacagaagatgggtggatgccaggagcagcatctgaggatcttttgagggattatagggctgaggtgagactgaattctgagacaggaccctgtagcaagggtaactatgctaccctgggaggatgtttttatgtcctatgcccttcccagtagcagccatgattctacctgccctgggctgtgatatttagctctccccctgatgttatttctctttatcatgggtgatagcactaattaagaatagtagtagaggctttggctgttggcctagcaaaaactaacccaaacagtaaatttatgccaagcattttcctcaggaaaaaaaaaatgtaggcatggtctacctgttgtattgattagtcccagaaatgtagttggtaaagttgggttttgctcaagtgtctggctttgtggattagctcagtcttgcatatagttttccataattgcttaacctaaaagcattctatttgattagtacaattagtttggctttctccctcttaccaatatcaattcatatgcattccctcctaacgttgctcactttattttgtaacaaagaatgaagacagcagaacttcctgttacttatttccatattagaagaaaaggagaatatgaccttacgtagcaaagcttacatttttaaaaaatgtatatttttaagaaaaagagaactacagagtgaatgcagaaaatattgaatttgccaatgggcttgttgctaggttattagcatttactgttgtagtttgactctttccttgagtgcccctactacttatgacagccaggacagctagcaccttgacacccttttatactttaataccttgggagaaaaggatatattgattttaaaatgcatatatatatacacatatatatatataaatatatgaatataaatatcatttataaatataaaatataaatatgcacacctatataaataaatatgtatatttataaaaatatttataaatatgttatttataaaataaatatataatatattatatataaaaatataaaataaatttatatatttatttaataaataacatatttatatattgtatatatttatatatgcataaatataaatatgtatatatattctccctctcattctaagaaaggatttaaggaaattaataaaagtttatagtatacaataggataaaaaatgtgtagatgaacgaattagaatgaaagcaaaataaacaaaaagccaagaaataagggtagtaccaagcaatataaattataagatcatgtacaatgactagaaataggtattaatttggccctgagcttcctagcagctaaaacaaagactgaaatataattaattacaagatttacaacatccatggaagttgctcagaagaatcgatttgaccagcattaagatctgaaagaaattctcctcgtatcctcacacagggagtccagggagatggcagaggctggcatccttgacagcatctgtaggactcctcttacattccccagctcctagaacaatgctgcagttataataattgttgatacatatttgattgattggactaggtatctgtaatcatattcatccttttgtttctttaactcattggaatctgagtcttgattttcatggttgaaatgaatgacagcctattttgatgtgagccaaggtgctgagtatttggtgatgccatgaggcctttcttctcttgtctgtctccttcttctgaccattctctggtgggttcgcctcattctccagtcttttctccctccatctgaagtcaggaatggggttgaggatgctgttgttactctggttattatccccaggaacagggttaatggaaccagagagattcaggtaaacaatggttagaatggagatgctgagaggctaagatgggatgccagaatggaaggttctgatgctgcagtccttaaaaatgaaagttctgagggaatatgacttcagcctataaagctggagggggctgagtgttatgaatatttggcttacctcatcctggcaccaaaaacatcccctcaggtaaaaggaatacatttactacaaataaaagtattgcttgatgtacattttaagcatatgagaggattactcccaaagatagaagtgaaaagagaaatattcccatttattaactgaattaattaaatgtccactgcataccggtcctctgctaaatgtgggaattcagagtgaaagaggtcatttctggaatcaagaaactgacagtctggtggaggaacagacagtttagtatatcataggttaagtctccctagtgagcaggttctgagtaatttggaagtagaggaatggtacctaacaaactggcacaggggcagcacctgcctggcatcggatgggcctctctctagcctttccatggtggccatttttaatggatcacagcacccttgtcacggggcctgaaaggagtgcagatgcaggtccttctccacacagtgctccagcaaccactacctcgtcccccggagttagccctagaagaaattggttttctatttctgatctcccactcagtctcctaagagagcaagtctatgatggaaacttgggagagatggagaagaggggcatgtaaggaaaaaaaaaattagcttgtgtaaaggtaggaaggagagagagcatgccactttggggactttgtgtgtgcttcagcatgagtagagagtgggtgtgagagaggaagagtctgaggtaaggcccaagaggtaacaggggcaagaccacagagggtcatatttgtcatcttaagcccatatttgtcattctggcattggtttagcaggcagtagggagtcattggaaatgtgagggttgtggcgtggttggatggaagtgaaggaggaattggagcagggggaggctggagtcagcatgatagttattcagaaatgttgcagaactttacttaggcagagggaggaggctagagagagtagctttgaggaggaagactggactggacagagaaacagtggacgcagagggtagtggagtgcaaaggctctgggatgatgccaaggtttcagaagactgactacacagactacaggtcccactggcatgctctttctttgtcttcttttgaatgtagctttgccactctagatgggagaaaatgcagctggtcattgatggctgtggcttttctcctacacccttgctgggcagaggtgatgcttttcccacctgttcctgaggatggcttgcagaaatcctgctaattctctctgctgcactgctttccctcaaagaaggctccggctccgtggagaccaggggctgggtggaaaggaagaggccagccaagctgtcatgggaatttggtgactcatttcatcagtttactgctctgaaaatgaggtgacttccccctttgcttgacaactgattgatgaacatttcctgagtatttgcagaatagatgttttgcctcatgggccttcatgtttatgtgctcccagtggattctaatcctggtgtgcttcagcctttcccacttctcagctgctaatttttctttctatgtagagtcttcagattacctgcccaagacttaatagaatgcaggattagaaacagtataccgttatgcctgctgatacaactctggttacgttgactttttgccagaatgttaaagaatgaaggatacctttttacactgaaacagtatttatttggctaaaaacactgtcacctggtacttagtgtgtctacattgaaagctgtctttcaaagtagcgtacttcattttgtgtgtctagaatttcttgttttgtttttagtttttactttcttccccaagatgtgggtttatgtgtttttagaagaattagctttactttgtttccatttttcctgatgctcttgatagtgaaggaatcagctttggaaaacattaattgctccactaaataatggaatcttaatacaagttacatagcgagaagtggaagcattgcttttaggccccaagaatagaccttaggctcattttccataactgaaatggaagcaataggtttgcattatgtggatcagagtcatcatcttagacactagccatagtccgtagatttaattttcatatttcaaatggaggctgtaagtttaacatgtcttactttgcagctggaacagattctatttttaatccgtaagttgcatatggcatggagccatgtgctgcccagatccaaatgcataactcctgttgatatcagtgagcttcatgatgaattggaaagaactatgtggtctttgttccaaacatctatctgactttttaggattaaacgtgctaaacaaattctagcacttttcaagttcaaatggagtgtttttgaatgtagcaaccatgctggcttaaaggaataatgcaacaattccaaatagacacacgcacacataaccgtagaattggttttcaggcagagaaaggcaactgggctcaggaacctggctggcatagtaaaggacatggttgtattgagctacacaaaattgcctttaaatagaaaagataagaggagaaagccttttctttggatggtactctgctcatcagggtacacattattgttggtgagtaactctagcaagagccctcttgtacttcctcattcttatgaccgcaatggtgggaattgtctggcaatattcattcagaactgacagatgtttgcatctataaataaatgtactcaaatcataattgttataacaagattgtttgattacctggcaatggccttgtgctgagatagcttttggatcacctgttctttgggaacatttgacagacctcatgtttattacccaattggatgtcagtagcaattgcagctaaagaaaaaacaaaaatgcaagtacttgttgaccttgacttttttccacaagagattggacttgatggctctattgcagttgagctgataagggctataaacagtagtttaaagaaaatgttttattcccagaggaaaacaccctatttgctgtgggaaatggcaatagacatatacgccttttgccagattttcttaatttacctttatttgggctgtgggaaaaggatatgctggaaaagctttttatggctttaatgtacatttgcatagattgttataatttgtgaatggtgtagttagtatattgaatacaatttaaaagaagccaatgatgtttctatgatttatgataatatgatttttttgaaactgtcatgttagtataagattgtgtttcagagatgaagatcttataaaaatgcaatagacttatggtgccaaaatgctctttttgattttaattaaaaacataaaagtgtcattggttaatatgatctcactaggagcaaagaaagaaaattgatccagtgaatatttacatgggacattccagaaatgcactgggggataaggcaatcagcacttttctttaggcacaaagtcttaagctccagatttgaatcaagaagccccgggccatgaaggattccccatttcttggtgagacagtaaggctcggtaacctgccctatttgctctttaaaaatctcactgcattttccttcagaggagaggtgctttggctcaatgccactgacttcaacttttgctcttaaaatgttgttttgatgcatagtgtagtgatggctgaattgatttctgtgcataaacggtggcctagattcttgccctgtggaaatccatggaattaagaactctaggttcctggagtgataagaggtaagcaaatgattagatatgcatgcagggaaaaaattcaaatgctcatagaatagaaataagggtctatataatttgcaagtttaatgtaaatgcaagccactaatacaaccaataatttaatgctaatatgtgaggataagtaaatgttattctaattatttcctatttggtgtgttctcaaagagttctgagcaaaaaatatactgcattgaaatatttccctggctactcaggatgaaaatgtggtctactaacagctgtggccataatgaaacctctgggatactagtgactaaaatttctctttagatagaagtttgggacaatttgagatggcagaatctaagccagagtttctttcaaggagatttagcacactgggatattatgtgatttatccaatgaaggtacaggctgagatctagctcaatatgcccttttaagtagtcactagaattatttaataatgcagaatatatttttggtaaaaagatttgatctttttgtctgtttttcaaagtgcaaatttcctcctgaagatagacaagtcttgggtacgtttttgtgagaacagaccctttgaatgaaattttaaaaccatcagaaagtcataacatgtataatcaatagggaatttcttgctgtctaagaaaacgataggaaagaagagttccactctctccagtcttctttgctaagtctcatttctctacttgtgcatttctttggagaataactgcttgctgacttctactttcctatgaaacttttgtgaagaatggtggaaatctttgcaatgacagatgccattgcagattattatgatgtccattacttggagaatgaaattaggaagagtttatttctgacatggcacatacccttccctgcaacagaaagactgtagcctagaatctctgttaaaaaaaaaaacaaaaaaacaaaaaaacacatcctcaggatttctggtgattctctggttgatgtggtagaaatgagcagagaggcaagtctgctgcctcaggcatcctgatcccctgcagcaggagggcacccaggacatgtaagctcaggttccttttggctgcatgagcagggaaagtggaaggcagggtatcctacattcttcctactactcactgaaggatgtggcaagggcatgaattgtttgtggttggctctctattctggtgctaggaaagacttctgtgtttatctgcatctttctaagcccccattgctatgtagccagctcccaggccactttgtgggaaagctttctttgtgatggatgacgtggcatttcttgtcacttcctcaaattccttcctgctgcctatcagcattgctctggacttatctgggttgagcttcagccagctaaagctaatccaggttcctatttcagaggagcaaaatgacagcaatgacgctgccattcttttggtttgtgacctaggatgctggggagaaagagcaaaaagaggagggttgcaagagttggggcctgttggcttgatttttcaatcctggtaccttgagcatctctttattctcatgagtcttgcctctccataaggctgacagtattatttattttcatgtgcagttggatgtaacttttccaactctgacctgaagtggcatttacctgagattggttttattccatctactgaagttggcgctgacaattttgagcctcttaaatgaagtcttatgaaatggagtttagaggatcagagacttgtggctctttaggtctgatatttctttttttttttttttttttttttgagacggagtcttgctctgttgccaggccggagtgcggtggcgtgatctcggcttactgcaacctccgccttccagtttcaagtgattctcctgcctcagcctcccgagtagctgggattacaggtgcacaccaccacacaccacacccagctaatttttgtgtttttagtagagacggggtttcaccatgttggccaggatggtctcaatctcttgaccttgtgatctgcctacgtcggcctcccaaagtggtgggattgcaggtgtgagccaccatgcccagtgatattccattatttaataaatatatttactgaaaatctactatgtgccaggtacaatgctaggtgggaaatttttcaaacaaataactcatttttcatgcattcagattctgaaatgtgcccaccctcgttcatttgtgagcctcacaccaccacccttatggtggagcagagattggtgtctctatttcataggtgagaataacctaaggcctgacagggtgtgagtgagaaaacaacaggacctaagtcagtcaggtttctcaattgcaacaattttcttttttaccaggttaagaagtaacctagtaactgatatctttttggttcatttatttttgaaatgtgtctaccagttctctctctctgtctctcgttagaaagagagaatacagaatgacatatgaggaaggatctttagaagaaagtgatcaggcactgcttagcattatatttcttgcattcatttattcattcacggagacccttctgtatagagggcattgtgctaagctctgggatgacagaaatgagtaagaccaatccctgtcctcaaggaattggtagtccagtgtttgtttctccctttacccctgaattgagaactgtctggaacacacatatttcccaatgttgctctctttaggagttacctgctgtctcattcaatattcctgatgccatctagtgatattcaggcatgagggggcttcagtgtaggatcagaatggaagcaacccaatattggtctctactcatggagaacaggcttttaataaatcagatttctacgtgagatggtttgacttttttggacacaggaacagcctaaactcacccataaaatggaagtagtattagtacctacttataggactgctgagaacattaaacaagttaatatatagaattttgaaccatacctggcaatggtaagcattatgtatgtgttagctgctgtcattaccacatcatcattatcagctgattaatttttctctgtggaaaaagagattctgcttaggactggtgtccatttctaaggggagttatgcttatttttttttttttgtcttttttttttttgtctttttgtggagaacggggtctcgctatattgcccaggcaggtctcgaactcctgagctcaagctatcctcctgcctcttgcctccctgagagctgggattacaggcgtgagccaccgcgcccggctggactggtgtccatttctaaatgtgagtgatgccttccaagaaattgagaatctagtattattcccaaatatatatttattttacaacgaagactgtttggctgcccttttgtgtcaggacagagggcattgtaaacttggtgggccatcaagattttcactcttataggactcccttccactgtccatcactctgaaatgttccacaggtctgctacttttacctgaggaggcagtgatgaggaagtgaatggttgagaagggacgcagactgataaaattcttaccacaaggccttgggtctactggattccttttaaacaactgcttatgttccttctataccacacattaaagtgtctgtgagaaaatgaagtttgtggtgtcagttaagattacaggttgaatggcatacctcttcttgatggtcagattgggttaaggttgagtgtccttgggggtcctaggtggaatttcctcacaggagccaagttaggatggggaatatatttggccactaacaaagtttcttcttgtgtctctggtctcatctggtcacaataacctttggtttttgatgaagctattgggtagtctggcctttgaatttcagtacatcaatgttactggtaaatcttaagatatggaaagataatccttagcattatggataaactttaccaagtattccagatatcttgagaactaggtttgtgacaattgcagttggtaaaataaggtttaaaatacctcttgcctattaattgcgactagaaaagtttgattctggtaagttatggggaagcaaaactagatttatagggagggttttatttgtttataagaaatcaactttaccacttttttcatctaccaaatgactcgaaggtgctgactacccgctcaccctctctgcctcatctggttatgtctttttctcttttttatgtgtacagtgttgtagcatagttatgatgagagcacagagagcccatttcctattttgactatcttcctttatttttctattcattctctcatgacatagcaaagtgcttaaattttttatattagctgcaagcccatttatcccttctcaagggattataggtggttttctaacaatcaaacatgatcccattccttttttacaaaaggaattttctttctttctttctttcttttatttatttattttttttgagatggagtttcacttttgtggcccaggctggagtgcaatggcacaattttggctcactgcaacctctccctcctgggttcaagcaattctcctgcctcagcctcccaaatagctgggattataggaatgcaccaccacacctggctaattttttttatttttggtagagacaagattttgccatgttggttaggctggtctcgaactcctgacctctggtgatccaccagccttggcctgccaaagtgctgggattacaggcatgagccactgcgcctggccaaaaagggaatttctaatacttgtggtgatgactctgttctgttggggcaccatacagtgaaaatgtccaaagatcctcatactacagcctaggatggtacatagaaaatttaaaatataggacgagattttttttggggggaagttttatgtaacttactctatacaggtgtgagatgatttttttgttgttgtttaaccattttttctttattgttggcttatatatatatacacatatgattttttattaatatactttaagttctgggatacatgtgcagaacctgcgggtttgttacataggtatacatgtcccatggtggtttgctgcacccatcaacccatcaacccatcatctacattaggtatttctcctaacactatccctccccttgcaccccaccccgacaggccccactgtgtgatatttccctccctgtgcccatatgttctcattgttcacctcccacttatgagtgagaacatgtggtgtttagttttctgttcctgtgttagtttgctgacaatgatggtttccagcttcatccatgtccctgcgaaggacatgaactcatccttttttatggatgcatagtattccatggtgtgtatgtgccacattttctttatcctacattgatgggcatttgggttggttccaagtctttgctattgtgaatagtgctgcagtaaacatgtgtgtgcatgtgtctttatagtagaatgatttataatcctttgggaatatacccagtaatgggattgctggatcaaatggtatttctagttctagatccttgaggaatcaccacactgtcttccacaatggttgaattagtttacagtcctaccaacagtgtaaaatcattcctatttctctacatcctctccagcacctgttgtttcctgactttttaatgattggcattctaactggtgtgaggtggtatctcactgtggttttgatttgcattcctctaatgaccagtgatgatgagcttttttcatatgtttgttggccacataaatgtcctcttttgaaaagtgtctgttcatatccttcacccactttttcatgggattgtgtttttttcttgtaaatttgtttaagttccttctagattctggatattagccctttgtcagatggatagattgcaaaaatcttctcccattctgtaggttgtcttttcactctgaggatagtttcttttgctgtacagaagctcttcagtttaattagatcccatttgtctattttggcttttgttgccattgcttttggtgttttagtcagaaactctttgcccatgccagtgtcctgaatgttatcgcctaggttttcttctagggtttttatggttttaggtcctatgtttaaatctttaatccatctggagtaaatttttgtataaggtgtaaggaagggatccagtttcagttttctgcatatgggtagccagttttcccaacaccatttattaaatagggacttctttccccactgcttgtttttgtcaggtttgtcaaagatcagatggttgtagaggtgtggtgttatttctgaggcctctgttctgttccattggtctatatatctgctttggtaccagtaccatgctgttttggttactgtagccttgtagcatagtttgaagtcaggtagtgtgatgcctccagctttgttctttttgcctaggattgtcttggctatacaggctcttttttggttccatatgaaatttaaaatagttttcttctaattctgtgaagaaagtcaatggtagcttgatgggaatagcattgaatctataaattactttgggcagtatggccatattcacgatattgattcttcctatccgtgagcatggaatgtttttccatttgtttgtgtcctttcttattttcttgagcagtggtttgtagttctccttgaagaggtccttcacatcccttgtaagttgtatttctaggtattttattctttttgtagcagttgtgaatgggagtttgctcatgatttgggtctctgtctattattggtgtatatgaatgcttatgattttgcacattgactttgtatcctgagactttgctgaagttgcttatcagcttaaggagtttttaggctgagacgatggggttttctaaatatacaatcatgtcatctgcaaacagagataatttgacttcctctgttcctatttgaataccctttatttctttctcttgcctgattgtcctggccagaacttccaatactgtgttgaataggagtggtgagagagggcatccttgaaaaataggacaagatttgtgaagcattgcattgacattcttttctacatatcattttttagcatttccgcaattttttattatgaatgttttcatacacgcagaaaaatagaacaagttgtacaataaacacctgtaactcaccattccgtttcaacaattgttaacattttgccatgtttctttgtctatatacatggatacacacacatatatgtatatattaccatgtgttcttcatcagtgaaaaaagaatatttaggaatccatggatttctgaggagatagatatttcagctatacctatattccccatcaaactgtttaaccacttattttggtgtcttggaaacaaatactgaaacatttgcattcagaatacagttgtgtttgactctatgcaaagatcagctcgtggtgatcagtgtctattttaagtaattggttatgtgtatttcattctgggaactcctgagtgtccttctaagaggacctgtggccaactttgaagacttgctgtccttgaaatacaggttgtatccctacttcgtaacttacaagccatgtgctctagcttgtaaataaagtaaattgagctaggtgattgaatgtttcccgtcacttctaaacgactgaaattctaagaaccaagttgaaagtttgcttacaaacctagctagaatgaagaacctttcagaaacattttacatatagattgaagtatgctgaaggtcagttaagttccacataatttcatggtcaatgagaagaaattctgaatctaggacttagcgtcagtaatagccatcaaaaagtacaaaaccttaatacccgagtttcctgaatatctgggtgcaaagtggtattacagatttgattcttttgcatacaaatatggctgaaaagttccaaatgcatatcagcttttttgttagactttggatatgtaagtgctttatttggttattactaaaatttcccagtgatttgtgtatttaactatttgtcttctgctttttttctccagtatactttatctatgctgatggaagagtgtgggtcaggaattactggtataaacagattaatatgtcccatcaaaagaaagaccattttagttatatcatgtatgaggtcaccttacatggtttgtgaagggttttcatgtttttctccttggatgaaatatatacttctgagaataatatgactacatcaaataaacaatgagctggctaggtgcagtggctcaagcctgtaatcccagcactttgggaggctgaggcaggcggatcacaaggtcaggagatcaagaccatcctggccaacacagtgaaaccctgtctctactaaaaatacaaaaaattagccgggcatggtggtgggcgcctgtagtcccagctactcgggaggctgaggcaggagaatggcatgaacccgggaggcagagcttgcagtgagccgagatcgcgccactgcactccagcctaggcgacaaagcgagactccatctcaaaaaaagaaaaaaatctattggtaaaaagcagctgacaatatcagcatttgtttattatcttggatttaatctgttgataacaaggtgaatatatctgtcccagcacacaaggataagagaaaacttcagtctgatattggctagtgaaaatttcagcaaaatccttttagtataacatctgccttaataaatggcattaaaagcggggaggtaaagaggatggaggcattctctcttccaaatgtaaatatactgctgcttacctgtcaatcttatgttttctaagttaattcttcctaaagttttttgtttttaactatttgatgagaagattacactgctacaggccaactaaatgggatgtattatttgaacctcttccattgtttttaaaatcattgtttgtgttgtaatcctttcaaagagccagccagtagctgctttcctgtttaaagagtaagctctttccattggcagatcaccttcatttaatcctctgaaagtgcacacttaattcttagcaacaatgcatttttagcaccaaggacatattaccaagaaaaactgaatatggcaaacaagtagaaaaatacgccttagttgtctaagaaggtaattgtgtcttgcttttggagtcttataaatatccctcttggtacaattagcctctgtaaatatttgaactcctttgtagttgaaacactctatatttcaacaggcagatgaaggacagtttttcaggttgattcttaatatagtagacttacattttattgttggccacactttaggattttattgcattaaaatgtatctgtgattgttaatataaaacttcaatcaacttgcttaaatattggaagctctcaggatgtggaataagcatggcattgtggagaatatcaccctggcccgagtcaagtgcacagtgctgcaaaagcattgtgctaattttagcttacaaagaggatgaagataaactgcctactgctagtttgccatatgctatcctggtgataatattcaagtgcaaaatattccatagagagccttattgtttcagcaagggaagcctggataagagttaagcaaatttctcctcagtaagtttataagaaataatgaagtaaaacaattctcaaatgcaggtagatgaaatctgctaaatttattttggctttattgactttcatgggagttgacagaattagttttggtttatatttgattcaattttatctatttttcacatgtaaatcttaaaaatcaatctgaataaatattgatctctttcagagaggcaaaaatatagtttggattgcataaaactgcttaaaagacagcatcccttgaagttcaataaaggaataaagcaatctgttcaactggttttaaaataacactttaaaaagcctttttaaaaatgaaaaagtcaaaatccattacatttccatatttggcaaattcagcgtctacagtttcaccgaagagtgtttgacctatttatttgtcactgagaccacttcacagtgaagggattgttagttcctgcaaaactgagaaaaatccaatgtgcatagcgcatttgcagatggaaacagactgtgtagccggatttggagggtgggttggctggaagctttgtgttaacaactggtgaaaagcttgacctttgcgtgacctaggtcaaacaaacccccaactcaagagctctcctttgacatggatacctgtttggggaaggggccaaaaaagggaatggagataaaattatgttatggacttgcaagcttactttttaaaaagttctagttaacttgactgtttggggacatggtggccattttagggtgttataaaggaccacaaatctgtttgtaagtgtcaaagggaaagggtgatagggagacctttctttttttctttctttcaatgattcaagccatgcataggttttttcccccattgcaatatgatctgggttgtgattcacagagttgaatgaatgggctgaactccactgatgaaaacatttgataatgtgtaaaataaaagccctggcaaggaggagatggcaaagcttccattgtttgtccccacactttgtttttataggggattctcacaggaacaaataaattggagtaaataaaagcaaaatagcactgttagtccatatcgggactttgcacatgctcacaagtcaactttggcaggaaactagcaaaggtctgttccctaccatttgcgttgcatctttatctctccggttcattgtttgccactgagtgcttaaacctcaacttcccaagtaaaagcttcctgttgcttgcttttaaatatagttttgttacaacaacaagaaaaaaaaaatggagaaatgtattaaggaagccaaccaatggaaaaaaaaaagagaataaaacaggcctagtccaatgcaactacaaaccttcagggctcaaagcacacactgctgggtactcttgatgcaataatagtccccttttaggtataaacctataggaaccatctctatgcccccacaataggtcaaaagtgaagcagaaccatgaaaatgtccagtgtttctcacattggccctttggctgtatttggtttcacttagttttcactttgcagtgttgtctgtggatggaattttctgccctttcaattgcaggttaaaggaaatcccattctttattaattgtgctcttgctttgagatcctttaatgtcagtatatctgaaaaatggtatccattcctatagaaaatatggttcttattccaccttaatgggtgggggctactctgatacttcctgcaatttcagaggaaagtgcagcagttttctcaggccttggatataaacaacattgtttacgctgtttccactctcttcatcctctgtttgtacaggccctaaaacaagtgggtctgttttgcatttaaaaaaattagtgtatgttttcagaatcaatctatcaagtgaggccaagaaatgccataagaacacatgggtgggggttagcaaattctggctttcaaaactgacttgacagccatttaaaatgctggctctacattcacagagtgtgtggggcttcgtacactcccttaattccacaatggagacagttgatttgggtccctcttccctgcttattgcatgatataaggacagctgcacccagaaaattattagcaccgtccaaatgattcttttcaaagggaacttctgttgtgctaaaatacacacagcattgtgaaagtacagtttattgtagatatttaataaggaatctgttatcaatcactggtagtacagggaattaaaatttatggaacagtagctaattaaaacaggaaaagtgtgagcgttcacttgtgtgtgtgtgtgtgtgtgtctgcttgcatgtgtgggtgtgagcgaggaattcctagtggaggggggctagagggggttcctctattacatgcatactggagagtcttcatgaacacccttgcagtcctacaagaacagatgagacagacagctgaccaggcagccatgaacctttccgtctgtgtgaactgtcaccgtgcttatagacacaactccacatgttccgtagaagttggaaaatagaatgtgcctgcagattgtttgggcctgtgagtacaggattcaaacctccttagcagattgctagattgagactctgggtggatgctgaggtctcaagtctcagttcagcttggtttgctgcactgaactcagcacacacatggtcgataactctttcacttggctgccctctctaccctgcactggagaaactgcctcctgggcaactaagctaagaaagctgttgctctcatctggctggtttcagaaggagaaggatgtcaggagtatgcaaaagcttgtttctttgtgcaagtcttcagctgattctgagttgagtattcagcttgttctttcttggagactcctacagcagaggcccctgagaagtccttggttgtttgtgcagatctggctgttccattctgatgcacaggtattccacatgggtgctaggaaaaagtgtggttacaaagtggctctgggtcatttggaataaatcagttggacaactctttttttgttgttttattcaggacactggaagtttgtctcattgctttaatgagagttgcatcttcttagttatgctgttgaacacatctggggcctgttactgcacccttactcttagataaattgtagcacccatgcccacacaggtagacctcctaccttcataaagggaagtcagaggaagctgataccccactcaggtggcctttaaatttgaggggcggactttgggaccatgttgcttggcaacaaataacatatagcaaaaacaaacacataaagatatgacccatgatattcaaactttaaattctataacactagtttgcttaagatatcagctgctatacggtaaagtttttaaggcagctgtaatttgcggaaatgctggcatttactttttccatagtcttatcttgaaggcataaattggaactaaatctgggttcaagccccttctcatttctctggtactcttccagtaatatagttaacatttggataaggacgcatattatgattctatctatagttatttaccctctcccagtttaacatgaagccttgctagcttcctaactataatatttccaccttattttttagttatgtgttggaccctgagttgtcttaaggactgaggaatttaagactcattaatatttttattagtgttatttccttataaatgaattatccctttcagctaactatatctttagaaaatgatcttggttttcttccatcatcatatcaataataataaaattagctaagaagttgtaattactcttcctatattctctgtgatgtgcttaaatagaatatccacttattatgatgttaatttccatttattacaaatgagcaggaacaaaatgttcctaactgtctgactccaccttttcctgcacattatgactcccctataagtaaaccacacagcccactatcgtatgttctctaatgtactttctaataaataaagccagcttaaaaaaagatgttattcattacatgtaaaatgatcatttgaattgcttttactctgagtgacccatgcatcacttaatcagacccatttaaacagagagagaaagagaatatgagaactgagtgatctgtctgtatttcatttggtggcaatatgggcagaatttagtctaagaatgattctttagccatctaattgtttcctgaaaaaaaagtcttatcttcagcatatataggtggtggtatgatgggctgtatagaaatataagtttaatctgactagtgaagatcatacttcatcagttcacttgtgacaaaaaaagagtggcatgatctcaaagttgttctcagccttctcactcctttcaatcagttgaatcaacaaatcgatcacttgttccatatgtaatagctctccccgtgtagaaatgaagagttagcaaacctctagaatgcaagaccaaattctttgttaaagttttcttataatgaattctgtctattccgcatatatggaaaaactcagggtaagacacttaactttttttctgtagagaaacgaaagctgtaaaggcaaaggtatttttctactgcctccccttcccacaaaccactgtattactctaaagaaatttattatctcaatctgctattcatctaacaaactccaactgcctgctagtaccaggccctgaggaaatacaatactgaacaagactcatttactatgctcaaagagcttatagtctggtaggaatgctgcatataaacaggccgtgtaaaggtggtgtaatatcagctataattcgcacatggaaaatgcacctacctctgtattggaggatcccggaggaagttctcccatagtcagggaatgttttacagtacttcatgttttcccaagaactttcacatatatgatctcgcttgttcctcataacacccctttgaattagccagttccttatcaccatcacgtctttgtgggtagaagaaggaaggctcagcaaattgagtcacttcatgaagagtacccagaccgacctgagactgaggacccaggttctgaccttaaggttagtcatgaatgcatatgtttggggaagtaggggaacttggaaagacgagaaatagtggcccggtgttgcgaaattactgtttgaccatctggaaatttgcccctggttcacagccaggtttcagaagacatggaacaatcattccacattcacatagcctaagcacagattcagaatgcccactttccctcttctgaccttttttttttttttttttttttttttttaaactaaggaaaagaagcaagtctagaagacaggcaattagcatgatcactcaggccagtttttataattttggttttcatccaaactagtcacatttcatacttttaaagtttttaggcttttctgctggagatcatcttcctcacactgtgattcttaaaggttatgtattttttttaccctgatcatacttacgtcttttgacaagagagaagacggacatccagctttgggtctgcagtgatccatcattcaacttccggtctttttcatcatattagattgtgctagtacttgctctttccttaagctatctccattacaggagggggaacttattgccccaaatataacagagatgcctgacttatggagagttacttcagagatgtttctggaagaaagagttctttgggtataaatgagaaacaaggggacagttgtgtttcccacaccatattttggtatctagcatgtaaattatactctcatagaccacctggatctgaatggctgcgatctggggccctttcccagttttgcatggcagatgaggaaaatgcaggaaacgctgaggctttgaagatgtgctagaacctcagcaacacagagccactgagcagcaagaggaggctgagacagggcagaaacacccccactgttaagagtgatgagggtttggagcacctaatctggatctagaaattggccgctgtgcaggcagctgggtggttcaagatctagcacccaaagagtgtagcaagttcaggcctgggcatttcggcataaccagtctggtaggtggggccagcaagaaggaattctaggccacaggccaattcagaagtcaggcaggcctacgattggtattcggagatctgtttgggaagagatgatcatccctccagctggcagcacaggagagcagtattcagttctggggaaagaaagggctgggccaggggaggggaagagagattcccagccagctgatgttggagagaagactagatccagaagaggaccaagagcagagaaggaagtaattccttggtttctgtgacttctttctcacccaagatagatttcaggttagcacactgtgacgtcatcactgaaaacctctcccctcccctcgggcgtggggggcagtgtgtgactgttctttactccaggctggtgattcaggaggcagccttgtttgtgtttccgtatgcctcctgcaggggagacttgcttttctttgatacataaatggtgagtgaaaagtaactctcctgtgagcttggtctcttttttgctcttctctggtcgagcagcctgaccaggcctggtcagtgtgaattgcccaatttcatagtgtgcacgggggtctcaggagagggcaattgcctcataacttttctattagcagaatttcagattcctgacgtggagcgatacttgaaaaccatttgcgtgatgctgggaaatgtttgctttgtccttctttatgtcctaggcatgggcatttttgtcatttcactggggactacttgtaggctctgaaagcaggaaggggcttctctcaggccatgccctagctaagcgaggattcccctctgtatttggatagctggttgctcaagttccaacccttacatgaggtttttctgtatgattttctcctttatgttttggaggcacactcgggaacgttctcgtttttttttgtttgttttgcaatgtggctatttttgactttacaaagcattggaactggcatcctcccattcttgtgaactttctctggatctgtaaatacttggtatttgttttcttccttgtacatttcaggggtggtttttatatttaactttgactaagatacactcacatgctactctgagagtacatgcttcggtgtctcttttttctttgccttcagtaaaaaggataagattcagggaaggtttatgaactcactttatgggtcagacatgtgctggctgtggagagcatacagcaataagaaaggactgtctctaccctcagatacctttctagaggttaaagaaatgcaccttgatcattatcattgtctctaatggagtaaatggaaagggtagtggtagaatggttaggagtttagcctcaagtcagatctgggttgaatccacaaggatttgtattccttatctgtatagcagcctatttccttatctgtgcattagggacattcaaaggattaaatgagatacttcagaaaagcaaggattgtgagaattaattgatcaaagatcaatgccaatctcagtttctggtatctagtaagtgctcaataaatgttagtttttagtactgtttctattattcttattgtctagagaagagatggaaagttagtcctgtttttcggtagtgtgtctcacttttcctggatctgaaagatactttcttaaatgatataacttttttccttatcagtaaaacaaaaatctttgctgttaaaaactgctgcagaggcttggcatggtggctcatgcctgtaattccagcactttaggaggctgagacaggagatttgcttaagcttaggacttcgagagcagcccaggcaacatgtgagactccatctctaaaataagatgaataacataaaaaattaaaactgctgcagaaatattatttagaaggcagagggtgagttatcataaattaacctattttgtgtgggaaatgaaaacttgtactagtaaaaattgctttccaatgtatcctcatccaccaattggctgccagcttaatgtgatgggactatttaggcagcactgccacccattgttactctgaagcacacttgcaaagttccaagtcactttacaaggctttttttggggggctgtgggggaagaaaaagaaaacaatagaaaaaaaatggtatgccatgttaggagagtgggtatagatattttggaaaagacttctaggaatgggaatgggatggggagaggtgacaagagtagcaatggtcattttggagctttgagtgggggattcagattaatgttcccctgttcaaatggtgtactcactagcaaaacaaacataagaactcacattcgctgagctaagccactgctgccaaacgatgcgcgaaacatttttatatagctgattttatttcatctgccccacaactctaaggtgtaagtactattactaggttcattgtttccagaggggtgaaacggggctttggagaggttaaataacttgcccagggtcacacagctattaagtggtaaagctgggatttacatgagcccagacaaagaacccaagaagctaagctattctcttgtaatacctccaacataggaggcaagaagtgaggtattatacaggttgaggagataaaggggagagaggcctgcagtgctaacaggaggagctgggattcatcctggcttgttctgataggtcagttagtcttagagatacccatgaggtcacctactcaaaatggggctcagagtagccttgtcccattcttgtccagtgggcgcagctacagtcttcctggcctggagtgactggaggctgtccccacgtcccacttcagtgaggcattcatgtgcacccagcacactttctagctttatttgcctggaggggaagattctccagaaccttgttaagatgcacagtgtggtccttggactggcagtgtggcctcggcagtccctgggagcttgttaggaatgcagaatctcaagctcctccctactgaatctaaagctgcattttaacaagatcccagctgtttcgtatgcacatgaaagtttgagcagcactgctctagaaagttacttttatctttactgtgcccaccaaagtaatcaaactttgtgaagtacgattattttcaaacaagcctacgtccctgactaaccgagtggaaggtgtgagtggcactacaaattcacaaaagaactgtagcctcagataatcaaaggagagaaggtcagatgcaatcactgatgcatgctagtaattctcaaaccttcgttttcagaaacgattggattttcagatagatttgcagtaagagaataacaagtctttatttttttcatcccaacttctttcttgcacatttttcttctagctatatttaatatctgttctccccacacacttgctaatctacatttcacaatcttcttccacttcactttgtctgcaaagaaatctacctggacagaatagcatctctttttttccccctgacccttggcatttcctctccctccaacttctgcctgatcctaggatggactctctcatccctcattctctatcattagctctcaggctgcccttcctgcactttaccttcccccacaccttcttacaggaaagcagaatagaaaggcatcagtgagggatgaacaggagagtgccttgagagaagattcccaggaagacagggagagccagacagtggactggttgcaacccatgtagccgaatcatagtgctcattgctgtggaggctctggtctgtctagccacacagaccagtgaagtgagggtacataggttaaaaaaaaaaaaaaaaagcttctacagaatacagacatgttatcctggtgtgtcaatcaggaaagatgtggtccggatgaacagaattgtacctttttaaatattataacttttagggacattcttgatgaaaatgtttccactctatacataactctctcatatctgattataacacttaaaaaataatttaaagtcagtggacatatgagtttatgcactgtgctatatatttccttatttacacagcctgttaagcatttatatggctttttttcctatgctaaaagggccttgtgtgcaatgccttttaggttcttgtcttttgcctctttatcatcttatacttttacaaagctctcagcctacaaactatgaggccagaagctagatgagcaaacttgagaactgcatctaaattaaatgtaactgttcttcaattgagggtcttatgatcatttctctgtagaaagtatacgagctttaccacatataatctatgattgtaatctattggttcttaagcttggctgtatgttataatcaacttggagctttaacagtcactaatgctgaaatcttaccccacctcccaaactgatttaattggtcttgagtgcagtgtaggcatcaggatttgtaaaagctaccacatgatttaaatgtagcccatgttgaaaagcactccttctaatctggatgtcagaaagctttttaaatttttatttatttatttattttttattgagatggagtctcgctctgttacccaggctggagtgcagtggctcgatctccacttgctgcaagctccgcctctcaggttcaagggattctcctgcctcagcctcccgagtagctgggattacaggcatgcatcaccacgtccagctaagttttgtatttttagtagaggcagagtttcaccatcttggccaggctggtctagaactcctgacctcaagtgatctgctcgcctcagcctccaaaagtgctgggattacaggcatgagccaccgtgcccggccagcttttttatttttcaaatcctgcttttcaagtgtattttatttaattgagtttgttgaaaaagtgacctcagataaataaatgctatcttgttgtgtaaaagtgtttgtatatacacacatatatacatgcatagcaaatacatatgcagagtaatatagaagtttaaaactaaattacatagcaagcttttgcagatatcacaaaaataaatgttgtctttgtgtgtttgtgtgtgtatttgtgtttgtgtgagcatatgtgtgtgtatgtgtgtctgcctgtctgtgagatcctatatggggtactttttttcctaaaatgatctatttttgtggttatgtaggagtttatgaccattcattaatagagcatttatatgtattttggggagcatattatgagtaatgaactagcattattaaaataattttaaaaaataggcaaggtactagttctgaaaattctttctaagctgttgattcaaaataaaagtttatgacttttgtactgttttacctttgcacttgaaagtgcaaatataaaaataaagaaaatactctttatttcctgagaaaaagattgggggatttccattttattttaccaataatgtaaatgtatagatttcagtatattttgcagtgtactcacatcctgaagtttctaagactccattaaaaagttatgctgtttttgcagggattttttcagggcatttagttgtaaaaaaaaaatgctgaatagatgaaaaatgagtaaaatctgtgttttttttttctttcctattcatcattgctgtttgtcctctgtgtgtaggcaaccaatttgctgttgttcccctgaggggaattcaagtcaaaaagtaatattgaattactaggaaaaggtattcctatctcaaaagaacaaagtaaaatgattcagaaaaaaaaaaaaacttggaaaatttatccaatttcctggtgtatgttgtatgtgtccatggtactttacttctatgaacacttacataaaataaatcttaagtaaactataaatctgaacactgacaaactccaacggacaattcttaatttttatgaatgtagaaagtctgctatcttcctttaatcccatccaatgcacattcacattttgtcaatttttttttttcattctatgaaaacctagtaaatattttcattctgggtctcagttatttgatttctttccatgtttttcacccagttatgttttatacattatttatgttgaaagtgaagtgatagaagcttaattgaatgaattatttatagtaaagaagttattccacatttatttcaacagggtggaaatccctgacttataaatactcaaattgtgaatgacctagatatacatacagatgtttatatacatacagcctagatctcttacttgtatctcattgtgttacatccacagaactcatttactgtcactgcaattcctgtggaaaaacttgacgtgttcagaaacacatggcttcccaaatataggcaggggtaaatggcagggattgtgaggaaacagaggggaatagaggggaggcagaatataatgatcagtttggaaactgaccatgaactcttttataagaatggcatctgttgattaaaaaaacaaatcccaataggagctgcatgttttaaaaacctttacttattactttacctaaaattctgccatttaaagattcactcatttgcaataacagatctttcaaagatgccaacatttctgggaaggtgaggaggccatcagtcatttcacccccatccaaattagttctttgagattgcttttacctgaagtctggcttatatcaacaagcctgaaacgatggacattttgattgttgggagacgaagagggtcagttcagagcaggagaagaatgggtccaggtgaagtaaccacagtgggagggcaagagcctcttcaaagcactggagcatgtggaaactctaggggagggatactatgcagtggaaaaaagatacagaaagggaggtgctcagggcaattgcacatagtttaacatttttctagactggctctgtgcacaggaatatgagaagaaactcttcttcccccttattcttatactttcttcctgcacccagggctcagacatcagttggagctttattcacttaataattagttttactttgctgagctggctttgggacctgacagcatccacaactggcttctatgcaaaaatacatttgaaatgtccaagaggacaacttatcaattcatgtcagaatgtaatctgtgcctaaattggggtctacctgaatggactcattgcttttccattgtcccccattctttaatcttcatgatttaatcaggtgatttgttaggttgaactagaaagagactgggaaatgaggcattgtttgacaaaatttacatcatattagggcacgcaatggagaggacactcatgaccccatagatacttatgactcactaataggtcatgactctcagaaccctagggatgaacacccacaacctgctcctcttacctctccagcctcatcttgttttgctttcccaggttccagttcctccagccacacaaggccttggtatatgctgttcctttggcctggaatgctcgcctctgcccttttaggctgcccactacacgtagttgacttttctccgccctttagattttggctcaagatcactccagcctaagtgaagtcttcttgtttcacacactcatagatgtgtacttttttccaattaagagcttcagtttgcagttgtacatttattactgtaattattttgtttaactttagtgccttctaactggaaggcttgatagaaacagaaactgctgattttgttcaccatttatgtctccaagtgttggcctagtgtttgggacatcaataggttgttaaatgaatgaacgaataacaagaatgactttatgcaaaagatggttacatatatggggcattttttttttttttttttttttttttgagacggggtctagctctgtcgcccaggctggagtgcaatggcgcgatcttggctcactgcaagctctgcctcccgggttcgcgccattctcctgcctcatcctcccaagtagctgggactacactcacctgccaccatgcctggctaatttttttgtatttttggtagagacggtgtttcaccttgttagccaggatggtctcgatctcctgacctcatgatccacctgcctcggcctcccaaagagctgggattacaagtgtgagccaccgcgcccagccctatgaggcatatttttaaatgctacattttaccctttagcggaggagggggagcagtaaattcataggaagaagtattttctccaggctctgactctccatgtcttcctttaggtttctgtgatgtcaggagtccactaaagggcagaaaaaggctgtgagctcattccacactggttaacaattaacaatttctttcttttttttgagatggagtcttgctctgtcacccaggctagagtgcagtgacgcgacctcagctcactgcagcctccgcctcctgggttcaagcgattctcctgcctcagcctcccgagtagctgggattacaggtgtgcatcactgcgcctggccaatttttgtatttttttagtggagatgggctttcactatgttgggcaggctgctcttgaactcctgacatcaggtgatccacccgcctcggtctcccaaagtgctgggattatagttaatagccactgtgcccggcctattaacaatttcttgtcaccatttaagaaacctaaattctgctagaaaggaaaagcttgatggcagatctctgtggagccaactttaggaagcttattgagccatttcttgttataagtgccaataatacgtttatttaaagtttgtgtattcttaatctacagccccaccattcttagctccatcttttccgtcattgccactgctatgtctgtaccacagggcacttgttaagcctcttctagaacttagctctgccacagtaggttcccacgtctaactctttattttggtttccaaaggaaccgcttcaaattttccaggaaagctgtgggtggtaaaatatatgagaatatgccttcttttgttgttttcctttgattaactgggaatcactttgcgctaagaacaaggaagccttaaatatctatggataagagaagatacaaaagtgaggccaaggagttaacagaatcctaattaaagataaacttggatcattacctatttgtatattggctgcagagttgtatacttcatatacatatgaagtatagtgtgtttctcttgaaaatgtgtaataagacctaaggggttggccagacacagggcctaagacagataatccaagcacttggaaggctgaggcaggaggttgcttgaggccaggagtttgagaccagcctgggaaacatagtgagacccctgtctctaccaaaaattagctggtgtggtgccatgcacctgtagtcctagctactctagaggctgaggcctgaagatcccttgagcccaggagtttgaggttacagtgaactatgatcatgccactacagtacagtatgggtaacagagtgaaacactgtctcttaaaaaaggaaaaaagaaaagacttaaggggctgtattatgtcttcagggaaaagctgatacgattacttgaaaaaaaatcaaggaaagccagagttctagagttttatatatttagcatcagatatttgatgtttaaaatgccggcctgaagtttgagctgaggatcaaattgtctgcttagaaacaactgagtttctcagctatggtaaacctgggaaatgtgcaaaggggggaatataattaattaattcactgggaaaaaatgcagaaagaaacaacctttgctcagaaaagatgcacaaacagcaagaaattttagttaagtaaatgattttaaattataattgcagaaagtagtgatatatttctgaaaggctatggtagacatcataaagaattctgataccttaactcttagtccatcttttgtgcaagatgatcttaaaggtttagaagaaatatcccagctctgagaaatgtatttcttccatgttttcttatagttttttattgattttcattggtgaatatttttcaagagtttaatttagatatgtctcaaaaagaaatgtaagggatgaaaatgcaaactatggttttcttcctacagcgaaaaagatacattcatttattcattttataagcgatgaacaagtttgtacactgtacactggagtaacgccaggatttgagagcagagaggtgcatgacttggttcctgccttctcagaccctgtagtcaaatcagggaaagagatatggaaataaacagttttagcagagtgttaggatggaggaatgccagtaaaagaaaaatcacctggttggtgggtgggattggtgtgtcactaaatcagctacagtccagcaaatacctcttagaggagatggccattgagctgagctgtaaaggtcaccaggaagtttgtcatgttgttgggggaagcaagcgaagactgctgcaaggaatgggactaggataaggaaatgcaaagaggtagagagagcagtgcatggtgccatgagaacttcaagtctgctcaggaccggaggtggagctgtgagtgccagtgcgtatggggacttggcaaatactaggctggaaaaacacccaggagagagatcgtgaaaggccttccacgccaggctaagaagtataacctttattctgaaggcaaagggtagccaccaaaggattttaagtaccagggtgatatgatcagatatatgctttagaaaaatcattctggcagctattatatattctaaatgaagataaaacatctccttaagacctctgaagtattccagctggttcctgaagaagggatgtctataattcttgccatatatcctcttaacataccatagaaacattatcccacctgaattctggctaactagacttaaccatgacctggagaaataggtttggggtagttgttacatttttcctaataaccctggacatcaggcacacccagagaggccactgtaaaggaaacccagcctttccatattgatggggtgtttgtgtcagcagccactagcaaggcaggatgttctacacacttttcaaggggtgagatgccattttccctcatgtagatactctatgggagaaacatgcaagagaaaaaagaaaccttcatgttgggctttctttttgctgacaataagatcatgcaacaatatcctatttgcatgaaaatgtagccatcttacaacaggaactatacattcataagcatacttttgaatggaccatttggaaaactttttaggcacaatcgaatttatgcagtatcaagagatacaactataaatggcctgatttttgagtctaggtacgttttgggattaaacactgttcctaaacactggaagaggagaaaagtaaagtttaaagagaggatatggcccaaaactgtggagtctcaatacaaaattgtaaatgaaaatgatcttgaagtcactgtggcttccagcttggcttctagaaaaacaagggggtccacaaccttacacgttcatttgccctggcagttgaaagttcatctccttaattaggagttttgcttctatgacataaagagccctctaatagaaaacctattttatttttacctgatggcccactgacacaggaagttctgatcagttgtgatgtaaatcttaggagctgttttgggttttgttgttgcttcactctgagtaggtttaggggaacagcagtcctgagaggacaggagttagtagggagagaaaaaaaatggaagcaaggctttgacctgccggagaggagcccctgctgacacggtcagtctgacccattgaatggcctgaatacgataaatgccgctttatcctgccttgaaaggcacgagatagcacagtctaaatgcctgggcatgcttaaataggcgactcgggatgtttgagttgagagtgtttgaaatctgagctctctgacagcctgggagctgccacaggtcacctgccttgctccgtagggacaggcccaggtctcacaagaaattgtccgtagacgaattgtagtacaaattcctttctttgttggttggcctctttcactagaccatggcctataaaattttgtaaaaacaattcttaaatattatttgaaagggcaaatggcccacgctgaaaggtttgacagtttgacatatagtgcatggttttgatagctcggaaactgaaaagtgtggccaagattctccccctgctcgttagaaacctggtgtttttttaaatagtgtcttgttgctgtgcagagttcctctgctccttgaaatctgacaggcaatgagtctgctccagtgatcttaaatccttttagactaatttgtgagagagtagcaaagtactgtagctagcacctttgagtccagcatccaagaggcacagaaccaggtattgccaattaaggagccattccgataatcgtatcaaagcagattgctttagagtcttataatgcccgagcctgtgcctagagagagaggaacccagagtttcacttcaatgagggggaaaaaagagactggagtggcccggtctcatcagagcccaggaagttgcagggagaggatttctgcattagaatgttgcatatgtgcggcctgtgtgtgcgcagccccggccgctgcctctgcatagccaaaggccattttcaggagcctctggcccctcagtcactggcctgctagttaattgccacacggacttcatgacacatgggcagataatatgacattttcagtttctgtcactagcaaacgccacaacgttgcttgcactagttgctaagaagctgtcagaaaccattagcggttggctaaagtcgccctatggcatttcctcatagcatcagcaaaacgagcataaatcacccactggagcctactgctatcctaatgaggctgtaagcttgtttatggactagcatcatttttatgattatttccaccttttcagtttgccttcatttggcggcaggagaagtcagctccaggaatgaagtcactgctgacattttacaaatgtggttcagagctgctgcctgctgccgtgtggtcggccggcggttctccaagtttgtttagtgatctcaaaagtaaaaaaggaaagaaattctcgagagaccacattgaggtgactatatcaaattgcggagtgaatggaaatgctaaaggtacaattgaccatttagactttcctctgaggttgagacatttccagatcaattttcaattttagaaagtggaagaggttaaacaatttattaaaatctatgaaagtgtttgcttttagaatagtctgttttattatgctcttctccttccccatcttctccatttccctaacttgtgtcggaaaggagcagggtttattgttttaggcttttctgaacatgcaccagtatttacactggattgaaagcatttgcttccaatgaaaatcttgtcttagattacaacccagcagtgtaatttccctcccagatgggagtaaagtagctgtatttgcctaaaaacagtaggaagaacaaactgtgcattaagccaaggctgtttttggcttgagctaatgatgtaatagaaaccttttattcaggagaggtcactgccagggactgaagggggtgatctggctcctgcttgaaaggtttctccattgtatctacataagtcttcacttaaaaaattctgttcctaatgcttctgctttcatacagcagaaataaacaggaaaggttctggtgagtgttacacatggaatgcagaaagccttcctctcctaatggagtatataattcaggtgccctcaaggcacgctttcaggaattcttttgcctgaggtaatgggaagctaaggttgctttaaggccttgattatctattgatgcacaaagctggaaaaaagtcatctctgctggattatagtagatatttccataaattatcaatgaattctcttctaggcaggcactatgcattgcttgctaaattaatctgaaggggtttgaggtggataaaaaggctattttttttaaaggtggaaaataatcatggggaggtggtgaaaacagtattgtaaggttataagcttttcatttttaatcaatgatcaggtcgtatgtgtcttttccttggttaccttttgcatattgaaagtggattagcccattgaaaatttaaatgctgttgagttgttttcttttctcatgtttctttaatgaattgttattttatatggtaaactgcttctctgaataaaaaggctgtttaaatactggactttcaaagaatttattaggcaaatccaaggggacttctcataaaatacttggttatgcaaataaagagtttggttgggtggaaggagtgctgatttacagatgtaggggtctggaacagcacagaccccagtagttccatgccagggtacatgaccttggcccagtcagagaacatagcattttcttcactgatacaacaatggctttggagtggtgggttttcatgatcttttccaagtgaacacaagatatgtttctgttaaacttttaatgaaacagatagattttaaatataataaaattacagatttttaatgaataaaagtttagaatcagaaaagttttgcaaaagttttgcatttatagcatattctgtaataatagtagaaatgttggaattagtttgttcctcacccaacaaactttctaaacttcatctcagtacaagttaaggcaattgaaaaaaaaaaattgaggaatgcttttcttttctttttttcacaggagagagatgggtctgctgagggagctgttaaaaacagttgattagttgcaacatacctactatagattagacagaaataactgaaattgaactagagaattatttttttatgtaggacctaataacagaaatgagaaatacagaaattcatgaagccatggaaatgaacctgaggctatgtgcaggaaacttgtcttaccaaagtttcaggttctttgggtcgtgtagttggctctccagtggcttatttaacccagtgaatgtgctcttgggtgtattttttttttacctcatttctaagcctggctgctatagctcttccgtttgggcccagatcaacctgtcggtttctaagagaacggttgaccgagctaagctactttttagtgtaatgggtcttgtcctttgttgttttcctttttgactttgatgccaaggcaaaaaatacctactttccatttgtaccttgtaacttattttgaacagttatatgggttaaatttttattttttcttattaaacatggcattttaaaaaagaaatactaactttttaaatttcattatgtcacagagccaaaatattttctagaataaagagtgtaaatgttataataaaaatcaatagaaaaataggatccaatatagaggaatatgttagcaggtgatttttcagtgtgaaaaatgctaggtttacctagcatgaattttagaaactgcctgaattattagtgtaatacaattctaatttactattaatttagcattaccttatttgatttacacagtaattgttttttaattaagaaactatgtcaggggtttttcctttactaaacttgatgctttctctctattacaagaaaaattatattttatttgaagcattcctatgtcaaactgcttatatgatggattacctacatttccccatcctagtttaactagtcttaagatagatcacttgtggaaatagttgatatcttaaatgaatcttctcacaagtcaatgtcaatgactgtgggatttgaatgcccaggcagccatagcgccacagctaatgactgccaccatgtttaactccccggtaggagttacacttaacctgtctcagctatacatattggaataattaccatagcaacaaagccacaaggggattggatatttccctccattccctttgacttttggcaatgttctttggaagaagttctttagacctgactgctcttgagcctaggccttgttctttctctgtcttggaaaacaaaacacaacaaaaaaacagtaccaaagaaactattaatcatttaaatttgctcttttggttttgtttatatccaaaggcattctatttgaataaagcatgtcaaggtagcatcagtcaaaatttgattcgctatgtttgcaggtgatggcttggacaacagtgtagcttcccccagcacaggtgacgatgatgaccctgataaggacaaaaagcgtcacaaaaagcgtggcatctttcccaaagtagccacaaatatcatgagggcgtggctgttccagcatctaacagtaagtggattctaaatgacatatataaactaaatatggacaatgaaccagtttttatacaaaaaaatgagaaaaaagtgatccctctggacttgaaatatttaataaataactgtgttcccacagtttttgcaaaagtattagcacttatttcttagatagataccccaaatgagaaattttatttaaaattcacgattgcgattttgttaactttcataagttaaaagatttaggtgttcatgtgcacttgtgattttaagtatgtgttttaatgatgttgcttttctaagtgtgacccttaagtgctcagaaccatctcctactaagaagaaagttagacaaaccctagagagagacttaatatcttctgatgctttagtggatctttacaacaaatggtccacaaaaatttaaatcatgttgcaatggcaagatgatcacataatttgcttttaagtggtttgaatgcactggcttccattacaaaacattcatgtaagtcagagctccacagtgaaagttgtccctgtatttagaactgtaaaggaaaacagcaatatagagtcagctcttcctgtgtagtcccttgtgacttttcaagcagagtaacagtttatattgtctgtgccagtattgctgttttcactgcaggaattctcctggagatgtgagaaactggagatttggggctttatgccactgggggatttgttttgtttggttattgttctgaatgaatttcatgttcaaaatatttataataataatattttggtggatatttttgtaagtgcataccaatttaaagaagaagatacaatgaagatttgtggataaaataatattttaaaaatcaacaaaattgttgaccagaggaatttcaatattagagacaaaggatgaatttagacaggttgtagcaaagttacatagatggataaatgttaaaaactcttgagggttgttttttaatatcaggagaaaatattttgtgttactatttttgtcttagcttgcttttcctaaagtcaatttttccttaaatattaaagttaatcttgcattgtcataaacacttgcagagcctgtttaccttcatacctgggcccacattcaaagccatgttcctcagtgagttttacgggtacagagatacaaactcaggggatgtctgcaggtcatgttagttctgctcctctggatagaggctgtgcctctaataatactcaagggtataaattaatccagattttccagcatcagtgaataagataaaagctgagagcagcaggaatagctaaaaaaaaaaaaaagtttcctcccttctcttcttcccataataattccaaacagtatctagactacactacagtttttgagtaaacttcagggcttggctatgctggaaattagttggagatttagattatttgagctgttttgattttaacatcatattaggtttacctagaatctgattcaggcaccactacttatctgacacctgttgcatgtgtgtagatatttcaatatctgactcctgcaaattccccactgaggattatcaatcactaatgaactaggggaaagaggactcaggtcttgagggcatatcatgaaaaacgaatgatatgacatttagataagaagtggcaattggtcaaaggtgtggtacaatgatgctgatgcaatgatgctaatattttatctccagaaataaccagctaactcgctgtgtggaatgagttggtgtggtggataaaatcaggttggccctgaagtcacaatcaaataatttctatttcctatagactaacagaaacaatgaatagatttcttcagcccccatctcaatctgcaaaggagttttggctttacttgaagctgaggtgcccctgaataaaatataatcaaatattggttcagacagaatcaggagagagagaagcaagctattttatgcagccactagttttcctgtttttctaggttgtacccttgtgaagacccttgcatagagctacattatcttcttgaaacaaacaaacaaacaaaaaacccaaataaactttctaacagcccgcatgattttacatgcattgcattgcttatatggactatgtgtttgttactggggcaattgtaatcgaaattattcatgaactgcctgatttcttgagacctaaataatagtcttcagttttgaggtctttgctggcctgtgccactgccctggaaggggaagcccattcatccatgtttccccagctttctgtgaatgtttataggtgttaccttgtggtttccattggatatttctacctccattacccactccaatgccatctgctcatacagaaatattgattaatgataatggtctgtagatagctaattgttcttataacatcatctgaagagcaaagttaagagatatgtttaaatttttcatcttttccttcccccaatgaaaaagattccttcccacttctctaattgcaagagcaaatagacctccagctataaggaacacccgttacccttgttttgtaatccttcttgaaggaatgcatggactgcttaggtaatatttatagtaaggagctaattttaataaattctattttaaaaacctatagaatctaaagagagttttgttgttgtttgtctaaatgtaagtaaccactgacatctcagtactaattctttagtgactttatttcaagttctgggaggtcttcagggatgcacaattcattaggaagactgtacaaattttaaatggtcacgtcattgctatgtgattaatgcaacttatctaggaaatcctttctgaattcttgctagatgtaaaaaagccattgaaattctggctaattaaaacaatagcaataccaatttattagtaaactgtaaactagtctttttttaaatgtcaaaagacatattcgaaaacctctcacaccttttaaaagcaaattgctatttctttttaaaataaatggatcaatcctttcactgggtttattcagtgaaaaaatctgcccttgaaaaggctttaaagcatttctgtgttagaagagtagaataggccctgaattaaaaaccaaaacaaaacaaaaaccaactttctgaatttgtaccccagctacatgagaagaaaaatgtggcagtctgtagttatccacaggtagacttaatcagtagcacattttactactccaaagagagaactaaagcctcactcttgggctcacagtctctagcaagctaaactggacatacttgtatataatgaaaataataaaagaaaaaggaaacgagttttaaactttggtgattatggggtaagaagaaatttcagtgaggtaaattcccagcttatacttagttgagcatttggcagagtcgataagtagagagggtctcttaaaagaaactattccctggaattgaaaggaatgactgacatgatttaaataataagagagaattagaaagaaaataaaggcatttattaataggaattcttacatttgcctgaagatgaattattgcaaacaattaaaacgtgcttaatatttgcatatgagtcactgtgtattcacaatcagttcaggggcatatgtcatatcaaggtttctttttccttcttgaaggcattattccaactgtaaacatagcctgtgacatcatagtgcttaagctggatgtgttttgcatgttatcagttcttttgctgcatagtattacaaagatatgtgtccaaaggcttagtgaaaatgaagaaaaagaatgcatgccacgtttaaggtaaaaatcaagggtctcttttcttttttgttttcctatcctatcatattgcagtctaaagtataatctaaatagaaaagcgcttaatgtggttcttatttaaaatatgcagtgactatattttcctgcatggagctcccgtgcttccaggaatactgaaagttagggataagggagggaggtagaaagcatacctacagattcaggtgaagcaagcattcacgggtcaatatccagcattgaccagtcggaatggtgattctgatggtgaactgattttcattcacactctctcctactccccatccattcaccatcctgaggatcccatttggttaagccttactacagggacaaactttgcttctaagttagacacacttatgtgccaagtgtttttgtttcattttctttcttctttctttctttcttttttgtgtatgtgtgcacttctagcctggaaaatttgtgtgtgtgtgtgtgtgtgtgtgtgtgcggccaaatttatgtcttgatttctgatttataagacttccctctcattgtggataaagccaatgcgagaggttgtagaatcttccaggttgagaatagcgtttccatagtaacactattagatgaaaagtgccctgcgggtccgccactctaaggacggagtaaatggaattgaattgggaattgaatgctctagaagagacagatgttgtttcattggtttcgtttttagtaacaagatctgttggagtcatcttagtgtcgtatccctccttgccattttggaagaattattctgtaaacattatgaattattacaatgaaaaagtacatctaattggtatctggataatccattctgttgatcaaagttaggaaaagatagaaggacttacaggtaggcacatgggcaggtagtagatgaaattttctcctctcctcccatttctatttctttttattgcccacctctgtactctgccagtttgaacagtgaatattccttttaagccttaccagccagcatccttcaacaacctatcctgaaagatctagggggagtcctgagaaggtggtggggaaggacaactatattctcacattcttgcccaaactgttcatcagggtatttgagaaaggcagtttcttcttcaaactagtcctaatctaccttaattgtcatgtgcctgagacaagggaagtggcttgtggagatagcaggtaactttgattccttcttcactacctgttatctgcagacagatcattaaattaagagccttgaaaactagtatgaaggtgcgagaagatttttttttccttgcagatgtccatgtaccctatcaaaaattagctcttttacatacataagaagaatattttcatagtttttactttttcccttacatgtaactgccattcaccttcacctctgaccaaagctaggctttgctgaaactaacccaggcttggatgacaaaatcctttatctgagttttaaaagatctctgctactttgtagatagcgtatttcaactttgactagataaggaccctgactatttttcactcaagtgggaatcatcagtctggggagggaaatggagtcgattatttaattacttgaggggaatattggaatgctctaatttttctgtgatatacatcatataaactctgttttaataatgaagcgggtggtttccagattctggggcaactgcctttttctttttcttagctggttattgaaatcctaatgggatgggtgatgaattttcttaggtcaggtaaactgaaaaggctacagctggaattcttcacccagaagaatcggagttaatactaatgatcattgtgaattagaagatcaaaggagaagcatcagcctgttctccacattgttgccccagaggccattagtgacctggcaaagctttctcccagccttctctgtacctccttccccttgcctgggcctttcttccccacttgtagttatgcacctctgacctggggtaattacagtcagttgatgcggaggcatgggggaaaacaatcgaaagcaaaatcaaaagtccaactttaaaattgcttatttatccaggtatatagcccttctgagcacacgacctctgtctgagactctatgttactgtcagagtatgagtgcaatttttgtgtgcagtgaaataagtggtttattcatttcaccaatggttgtttcactataagagacttttgtagagtctggctggcaatttgtcagatcattctaaaaattttctttttttcccaaggttaagatacagatacacgatagtttggttttctgatatattcttaattgggctgattaaataaaggattatgtgtaaaacaaaagtgcccatggactttttacaatttgttaggttgttactgatacacctaactgaacactagccagccatttgtacttcaaagtgtgtatcaatatcatgtcttctttttattttaattagtgatgatatatttttaaagataaaatatcaaacttggtcactgagcatgcacctcaatttatctttccgattaaaattggagtaccacaagtatacatgtgagtgtgtgtatatttttttaacgaactcaatccaacccctaggaattttatgctagtttggttctttctttcttcatgtttaagattcctaatgaagataccttgtcttaaaatatgaaggtttgaccacaggaaaatcagatagatttattttataaaagattccagtgttttggattgttttgtttttgttggttggtggttttgccagtagtagtaaatctacatgtcgtggaatttaggatcctaggactgaactggtaacatccacatcatatctgtctctcatgctaaagtgtgagtataactatctgctcatgtatgtccctacccctgccatctatgaattttagtagggaaaactgatccattttacatcttttaatcccctaagtagccttgtccaaggttctaatttttcttcttgtactgatgtaggtccatgacagagggcaaccaagtagtggagtacttgcacattgcaaccaagaccacgttgcaatggtctgttgctcagctcacaaaacactctgggccatgacccaagcttacctttgatagattgaaagccatgtggtagcaaaaaaaatatttgattgacgctccaaggcagtaatgatagggattgtgtagatccacatcaaaatgattgctcctgatgtgtgagcactttcacttcagtattgctcacccttccttgtgcagagtccggagtgtgggcaacttggctagcctctgtggacttgatagtcacttcagtgtgtcaagagccagagagtgcgctcaagaactcagataaggcatctctttcttggtgggccagtggagagcctccaggagtaagcagtagatgaaagggttatgctacgcaaccttctaacattttaaaggctttttagtccttgtttttcattgccattgcaaaacgccttcactcagcaaattataggccagtgagcacgggtcccaagatgaaatgtattcctctatctaaagaaaaggtagaccttaaataacttgatgttatgaaggccaacatcctaaattagttggtatttaaatgagacagaaatgacttggttttatgtttttagaaatattctgaaataggtcttggtaactgcttgaatttgaatgtcctgttggcatgatctcttaaaaaatggggtggtatatattaatttaaccttgtagttgtctttgcatttcatttcttaataatctatggtcagtttttatctgtttccacaattacctttgttgctagcatccctgcagtacccaagtgctgtcatttgccacgtggcatagattaccctgagaatttggtatcctgggaagtttttgggatgtccagagaccagcaggtatagtttttttttccaacatgaacactcatcctatgaaagatcaaggtcatttctgttgcagtttatagaagtttagaaaaaattcttatctattatttaaagaaaagccagttggccgggcgcggtggctcatgtctgtaatcccagcactttgggaggccgaggtgggcggatcctgaggtcaggagatcgagaccatcctggctaacccagtgaaaccccgtctctactaaaaataaaaaaaaaaaaaaattagccgggcttggtggtaggcacctatagtcccagctactcaggaggctgaggcaggagaatggcttgaacccgggaggtggagcttgcagtgagccaagattgggctactgcactccagcctgggtgacagagaaagactccgtctcaaaaaaaaaaagaaaagccagtttcccaacttcaagggggaagaacttcacaaaatgaattcgttgaaaaaataaaataaaatattctcctgcctgcataatgtgacttttattatatttttaaaaattcagctattaattgcttggctattttgacattggattattctatcctttcaacagctgaaggaaaaaaatttattgtaatgctaaataaaaatgtaatatgtatgtatgtagtgctttattgtttaatattttcctatacactggatgcataagacaatcctgtaaggtgggcagcatgacaaaaatgaaatttagagaagttaatgatttttctcaagatcaaaagcgaggaactggctgagcttgaaccaggatctcctgacttgaatttccatctgctttccaccacgctgcctctcaaacacacagcaaatcaaatcgcgttgtgggagttcaaagatataattataatctcattccacaagctagctaattagtatttttaaaaaataaaaatataagccagagggcttggcataaaacttcataatgcaatctgatggttattagtaactaagggtcaagaatggtccttccctatctggaatctttttctgcagatatctgcccataaaaaaggcaaagaaagctacatctgttgatattttgtgacaatcttgataatttttgcgtttttggaatttcagattttcaacattatttaactgctcctccttccttacagaaatatgtaattctctacccatgtctgttaccaacaatgtctgtgatagtgctttggggggtgaagaatctttcctcatgcagatcctaactaaaccttctaacacagaatttagctccttgaagattttttttttttgcctgtcacgtggcctggacgccaaagagctaagtctttaattttctttatggagatagaggaaactgcttatgcagccccgattactcttgaaactacaatccaactgtcgtttctcagcaaagaaggctgctaaacccaggagaattaagctgccactctggggtatgacaccgaggtctgatcattttaaagctagtaataaccagaatcctaaaattcttatgaataaaatgtaattttagtaatgtttccataaacagtggtaatggtggcattttagtaggcagtgacattagtcacatagaaattgtaccacattggcttttaaattactccacctgtctgtatgaatagaattttcagtgtaaaagcagagagacagctgctgctaatgtctccttctccctgtgcgtataatgctggcaaatctacatgcagaaaggactggcttgtgatgtaaaatggtacctgaccccgctggctcctgagctacaaagcaatacctttaattaccagtggctgtgtttagttgttgatataaaaatgtcagcttccaggagtgtcacctcaggttcactccctctagtaatgtcacccatcgtacaatatttttcttccacccacatccgtaatgcgatgggtgggcatttatctttgtgtgtttcagaaacatgcaaggcattaatagtttaaaggaaaacgcctaatactgtacgaacttgattaatgatctttccgttggagaaattttaaagattagtggaatttggttccttctttctagccagaacagaaatatggcatgccatttgtaccatcaaagggcttagcatcatttatctaatacaaatacaggttcttatgtgaggatcatggcaggcatgtcatagagcagaaagggtaaagaatggaggggcttgagaatatcaaatctgttactacgtgcccatgtttcctattgatagatgaggaagtttactttttagataagcccctttgctcttagccatttggttatggttctattgtggcagctccattgagacaacagtgggccaggcgaggggatcctcctgttggagatgcctgttgccaacaatgtatttgatgaaatggtaaataggagatatacgtgtctggctcattggcaggcattctttttgacttctttcacacaactggtgttttcgtgtttaattgaacaaggaatgagtagtaaatgaaagctgctgcctgaaatcccactgtgagcatgttttgcacttggctccccagtgaaaaggcaatttgtgaaattatgtgatggagtaattagatgaagccagggcttctgactgttgccatgcatatgtggcgagggtttgttgggaagagggagggggagaaaaaaatagattattactctggcaagtcggctcaaagcttcttcatttatttgtaaacagaatatttagtgaccgcataggaagtagctgtaatcaccagctcataaagaaaccacagcagagcttttggatttttgcagagtgctcatgtaaaatttaagctgggaggcagaatccctgttaatgtaattaggatctaatttaccaccctttgcacacagatgtaataatgtctagatatttattctatctttaagcatgttacatatacctcagtgcagcagttactgaacagaaacaggtgtgagcagtttcctaattcgtttttacactgtaaacacatagcaatttaagggaaatatttaccaaaaacgaggggaaagaatgtctgcaaatgaggcagtaatggacagttgccgtttatgtactgatggatttctcaatggttaagtaaattaaagcaaatgctagaaaaatcaataggccagcatagtcttggttttgcctcatagacttcaggacagaatgacagatgtggtgtctatgacccatttaagtattaatgcttgaaaaactgcttctgcatgcaaggttgtaggcttagaaacattctcctatattaaattacagacaataatatttttaagtatatgtggaatttatatgtttcagttaggttgttcttatgtgttacatttatactggaagattagttgcttagttgttgcaatagcaccataaatcagttttgaatgttcccacaaggaaacatcttcataacgctgtagttggaaggtgaagatgatgtattttgagctgacgtgtatgttgaagtgaatatgctcaacagcactctatgtggaaaccaaattaaatttaattaaggagtagatgctcagagcctttggaaaaaatctgtaaagtagcattcaaatgtggcattataattcagttaatctccagggctacaaatgctgtattttacatttgaactaacatgggtaacatgtcacgtaggttgactgtcatagcgtgtggaattgtggagctattctgatgtcctaagtggtaggtgttagcctctgaaaatgagaaggcagaccttatttggtagcccctcagaatgttaagttttccactcgttgttcctatttctaaaaattcattaccaatttcatgataaataatttaaatacagtcaaaatgttgatttgttgactaccagagataggaaggcaaggagagaagcaaggccaaatgtacttgcatgtcagagaccaaaatttgctcttatgatcgaaataaaatgaggttaaagttattatcctggtcattggaggagaaggtgccttttgttggagagaaaaagagttttgctggcttgaagtgtcctgtttaccttcttgtgctgtctgaacttagacaataattgctcaactaccttccttgctcatgacaaagcaggcatggtccagcctgactctgggttttgaaaatcagtatgtaaaggtaatattgtggctaggagcagtggctgttgcctgtagtcccagcactttgggaggctgaggaaggaagactgcttaagccccggagttcaagaccagcctggacaatatgatgaaaccccatctctacaaaaagttaaaaaattagccaggtgtggtggctaatgcctgtagtcccagctacttgggaggaggtgggaggatcacttgagcccaggtgtgttaggctgcagtgagccaagattgcaccactgcactccagcctgggcgacagagtgggaccctgtctcaaaatgaataaataaataaaatttaaaaaattaaaaaaaaaggtgatattgtgataagtcatatcattggaaacattgctaagttggtatgatgaaaagaagtacagtgattatttaggttctaaatagaagcctttaaattttttttcacacaagtattttacacaaatatttcatgaaaatatttacaacatttctccgaacttgtcaaatttatcatgtgatttaacaatgaacacatctggagttttaactgaggtataacaagtaactttaaaaaagtgaaagtctatcacctgaaaaactagaaaatgaaaattactacagaattgaaaattcttttgcttctttaaaaacagtgctccttggctgagcacagtggttcatgcctgtaatcctagcactttgggagaccaggacaggcagattgcttgagcccaggaattcaagaccaggaattcaatgggcaacatggtgaaaccctgtctctacaaaaatacaaaacttagcctggtgtggcggggcacgcttgtagtcccagctactcaagaggctaaggcaggaaaatcgcttgagcccaggtggtggaggttgcagtgagccaagatcactccactgcactccatcctgggcggcagagtgagaccttgtctcaaaaacaaacaaacaaaaaacaacaaacaaacaaacaaaaacagtgctctttaagctatggcatgcatttaaattatctggatctttttaaaaatgtagattctgattgagagggttggggcctgagattctgcattttcagcaagctcctattgctgctggtgctgctggtccacagactgcagcttgcatagaaaggatctaaggtacacaagcaagatgacagattttaaatggaaagatgattgtttttctctttgatttttatactttgattttgcccccctgattttgaagcttaccccattgtttttatcatattagtttgacaaaatgttttattttttctctgccaactttcaatgttttttaagcatataagaagttccttttgaatatcaaagcactttcattggatccctcaagtactctgaaagcttctgatagacgcagggctctgcagaaagacagactgtttcttctgggcttgttgacagtacacttgtgtgttcgggtgggtggaggggtagccctgaaggtcccatgatacagaatgttgtggttcacctccaccacaaggaaacatcttcatagcttcagtgctctggtgacaatatgcagcgacggaagttatcatggagtgagggcagtgtgtgtggcatgctagctcctagactcctgcagaggctctgcagatcaggtagcctttgtcagtaagaaagtaacagaatcactcactgcagaaacaacacatatgtttgagggagaactgcgtttgtgcctcacacttcttgcctactttatgtctgctccaggagatccttttgtattcccactgccttgtgtactttatctgccatgggcactgtcactctcaaatttcgcagcatcctggaaggaaggtgaatttgctttcaaaagtgagtatctgaaaagtatatttcctccagtgtggctaagatctaaggaattattataagtagtgcatacctattaatcattgcttagcaggtaaattctctcactcattagagttcacatgctagatgtagtttcttgaaattaggtcatttactttggtctaagtcattgaggatcaaaggtcataaggaatccaaaagccattagtcagggttcttttctggaccccttagatgtcattgtgcaagtcacccatggcaggccgggcctggcctgctgtcagggagctggcagggtgcctactttatttccagtttgcatagataaaaagcagagcagcgactcttggaatcactataaaaataagcttacataaaatctccatttgaaatacagtatgtgtggtgtgcccctgcatgctttctattctggaagccatgggagctagaaatcaaaattaagaagcgaagagacagacctctgatggcattgtagactactctttgtttgggtgtaggcatttataatttatggtaagtttagtgaagaccaaattttcacaaagaattaaaatgacaaaccaagcattttaatttgctaaataaaataaaggcattgcttaaccattgtcaaacatatatatacatacatatagctaccccctcttaataagactgaagtacatttgtcggtatcagaagtggtgggcaagagatatagtcaaatcaattcatttacttctctcattgagccctgtgagtctcaggcccacaccttgaagtgaaaacatcatcaattaccaaaatgacaggtgctcaggacttacttcctgaaagatgttcatattggaccagacaccacgagcactcagcaacattcatcacttcgttcaaaagagaccgaaaaaactgtggggtgaatttgcaagggaaaaaaggccaaatatacatgcatgaaatagcatacgtttgaatttctaaaagtcagacagcaagcaagtatcctattttattttaaaagattattaattgttatttaatagtcaacttgcatgtgatcttacaattaataattgtatccccatttcacagatgaaggaactgggacagaaaaggttaaagatctaacagccatcttagtgtacaatgaagttgggactggaaacaaaactcagggccataaatttcaacttcctggagcttaccacttccataccctgacacttaaaattatgacttgttattgttcttgaaattgtcctgcatacacagttgactagaactaatgagaatggaggcagaagtccacatagcctcatcagagtcatgcctttgacacagttattccagagcaatcacaactgctgtatggtcaaccagagctgggggcccctgtgtagcccctttgctgtccctagagatctctgtggctctgatacctgtattgcagtaaaagcaagtgtgtgtgtgtgtgtgtgtgtgtgtgtgtgtgtgtgtgtgtgtgtgtgttgggggggagacagggatcatgctggcattagggcctttatctatgaataccttatgctttttggtttgaggagagatggctagaatagtttccatgatatgatgacttaatcccaccacactgcaggaaaaagcaactttcaaacctgcttgttatgttacccaccataaatcatggcaaaactttaggccacatctaacttatctttgaattgcaatataaatggggtcattaaaagttttttccaagaaagtcaaatgttttttgagggcctactatgtacaaggaaccatatacatccggaacgttctatgatgtttgaaaagggcatggatctaatctctggtgcagtttatagaaagctggagtgaacagaacagtcagaagacagctataacagtttgggtaagaaggctgtgctgtgggagtacaaagaaatgaatgagtacaagatatgttggaggtaaatctgtacctcataaatagaaacattctttcagttaccaccacagacactagagatgtatatagagtcatagatccagagagtgccaagagagaaaaggaggaggccaaagatagaatttgggggattattatttctgaaggctgtctggaggaaaaacctagagaaggagagacgaacagacagacaggtctctgtcaaatacagaggtggcatgaattaatttctgggtcccttccagctccaatgctttattattctaataaaagcaaggaaggtacagtggtaagaaagtcgaagaatccattccctacactaaatccatcatggctcccaaactggctctccttgctgtcagcgtcgtctcagttcatgacatcaccatagacccagaaactccaactcagctgagacccaggagtcatcctggaaggttcctctccttcccccttcacaggcagttgctcatccctgagtcccatcaattctctctcctaaacacttctccattcttcttcccacctagctccattgccactgccacaggtcagtcctctatgtctccagctttctccgttcgttccccagccttcctgcctctaacattggtcccttataaaccatcccttattttgacacagtttttctaaaacaaaacttggctaagtctcctcctacttaaaatcctttgatatctccctactacccgtaggatatgagacaaacatccgtggtgtgccactcaaggaccccttgaggtctgacactggtgccctggcgcctctctcaccattttcatacaggctccccatgcatgccatgctgcagccaagctgagggcttacagctccccatcagtgctgcacagtcttgtcctctgtgcaccttacatgctgttccctcacctgagatacatcacttccatgaccccttctctacttgacactttcctccacatccttcacatcttagtacaattgtcactgcttggggaagccatttgttgttttccccaggagagggaaagtggcccctgcccccaggtccacagcaccttgatgagactctgatagggagtgcttatcatagtgactgtttatttatgctgtgcctttctatctagaggtcaggatttaatctttgctctgtacatcttcagagctgtactatagatgcttgatattatttattgaccaaagcaatgagtacagttgcaaaacagaaatgaccaaactctgggagctttataaagtagaaaggctggaaaagatcctgatacaggggttaggatatcatcagtgacttttgtcatttatttgtttatctacttcttcttatttcttttagaaatagggtctcaatctgttgcccaacctggagtgcagcagtgcaatcttggctcactgcagcctccacctcccaggttaaagcaatcctcctgcctcggcctcctgagtagctgggactgtaggcacatgccaccacactggctaactttttaagctgtttgaggcatttggaagagaagaagttgtattatgaggcatatgatgatactgcagtggaggcagcaaaggtagatccttttgcaatcacttgaggaaatatactaaaggatatactttagacagaagcttcaggaagtggtaacaagaaggcatggtttttcttttcttttttaatatttaggagaaaggatatttgaatatgtttacatatacaattgaattcagctatctttcctggaattgctactatgttccatgcaatttgttaatgcatagcctacttacttacttaggcaatagagacctttgaagatcaaagtagaaagggactgattaatgaagcaagaatcaagggcaggcagacagtggaggggagggtgatgggactcagagtaagaacatagcaataaggaagaagtcagagaaatttagaaatgaagaaggctgctattctcctcctggatcttttagcaggctggaggcaaagttaactgatgaatgtccaagaagtgggattaggagctggaggagaatggaagtcatttggaaaaattgctgttgggaacacagtaggcaaagcaaaaaaaaaaaaaggaaagaagaaaagataaaaagactttcagagtgtagttgagaatacatatagaagtagcactagataccacactgtgaccaaggactggctagacttttaacaggcacatttcataatcaatctgtttttcacatgttaaaatgaaggtaatagatgaattcttagtggttttccacaggaaaataattccattttctattccttaaaaattagtaccatggggccgggtacggtggctcacgcctgtaatcccagcactttgggaggccgaggcgggcggatcataaggtcaggagatcgagaccatcctggctaacacggtgaaaccccgtctctcctaaaaatacaaaaaaaattagccgggcgtggtggcaggcacctgtagtcccagctactcgggaggctgaggcaggagaatggcgtgaacctgggaggcggagcttgcagtgagccgcgattgcgccactgcactccagcctgggtgacagagcaagactccaactcaaaaaaaaaaaattagtaccatggggaacattcattgagccccagtctgagtcactgaagtttgtgccatcatatgtaggttagtgaactcaagattgcattaaaggttttatctcagctttggaggaagttaacatgcagttattgtacattatctttcagtactggttgtataagaagtttgcaaagttgttattgataacctttgcatgtgagttcaacaaaaaccatgcaaatgcagctgtctgctaagataaattttttttcttgccatgtgatttgagagaaaaggggagttttaaatttaattaagacaaatccacacaacattgtaaaatatctgagcaactgtacacgttaacaggtgaacaatctcagatatgttctggtaaaccttcctctgctggaagccttatttttagcaatgggaaggagagatgactggcttgaacagactactttagcttcacaagttgaagttgaattgatcttgacactgctccagaagagtctactgttgtcattttggtttgatggtaaatgatatacaattggcttcatgaaataaaatggtaccctacacataatgaacactcatcaccatatacaaagaacagttagctcagtgtgatcatcaggtcacagatgactcatgtgaagtctctgtttaaataggaaggactactgacaagcaaacatgctcacagaaaaatagctaagtagcgaaataaataaagggctcagtagtccttcaaacatgtattagaaaacaaattaaaaattggtttcctattcagtactgtaaggcaatgtcatgacagtgttggaaaaccaactccctggtagctggtgtattgcggacatttctgcccttgtctttgggagtgccacgtacacggttacacaacgcataaaggcgagggtcatttctaggacagataattgaacattaatactcgctgacattgccgaaggaatgatatgtcaacttgacagggcctatgtgcttacatctgctgattggctgcggacgaaggccctgtgtgtcaggatgagaccccaggcctgactgcagcagggccaaggatgcggcggccattaatcatgagctgccatcttgagccaagacagtgtctgtaaaatcactcgacatcctgtgtgtggctggcaagttccatctgttgtatactagagtttggtaggtatggctctcagttaaaaaaaaaaaaatcatcgcagaccttttggtttgcatcatctaaccagaattttgggtggaccagatgtcctttgcatgtatttctttcttttttttctgaaactagttataaccagttttagtgggtaaaagggaggttctgaggtggagtgtcttctgttcctatgggaattagttttgatgagtttctggtttcctgattcaccatagatagtcagtataatgaagaaatccaacaagaattaaactgaagttacttgctgtgatttattttttcgattctctacaaaatattaaaccccgtaggcagatttttgaacagggaaaaagaggtctatgcaattattttcttatccctgaaatcacatgaacagcactttcctccctcatttataataaatctttagtgagttaattctgttgctgcagtatttccacagccagcactttactgaacatgtatcctttcagagaaaaaaaaaacacaaaagcatggaacaatcacaaggccctctgacactcaccccaattgtgccttcttaaaataggggtaaacactctggcagtagttagtgtgggtttccactgcataaaatgttataaaatagggcccctgagagcatccattatcacatattggttaacatcacagagtttttaaatcccagttgccttgatgccatgaaaaaaaaaacagctttcatctgtaaaatctagtttccctttgttattaaaataaatgaagccattaaacaaaatatatgcatgtaatagtcgagttcctcatttggcatcatcaaaatgatggaattttgcatttttaaaaattggtgttgccatcttagcaggtttgatgtgagctacagaatccaaatgtgctggaggcttctgaaactgtatgacatgacatatatttctctctttagtctgcatatatatatatttatctggctctcctttaacaaaaagtagaattctgtttaagagaactaaaaaagaagacagttttttttatccaaaatcctgccatcaaatcaattaattataaccattgatgagctcgtattgtgactgtgctagaattgaaataatttccgaatactttatttccaaaggtttgtttttaattacagcagcatttggttggcatgcaagggcgagttctcactcttgatctatcctagctggagctcaggccaaaagatcctctgctcccttttctcgagagcacacttttctgccaaatgtggtgctcgtcccctgccaagaaaggtgggcgaattgccacttctgacttccaaccaccaaaagacaaaggctctcaacattcctaagtccactgagccagaatgggcctcacaccttgaaggatcccgattattattgattatttttcccccatagactttataatatagaatattttctcagtgccttagtcagtccccgagggtgacttaggcacttacagcaatgtgtgaccccttgaaggccactggagggtcattgaagtgtccttactcatctgtctgaggcctgagcacatctacactgtcagtgtcacctctatatcttgcttttatagtgtctttttttaacactctttaagttagaatctagtaattatttatttacttctgtgaagctcaaataaactcaagagaagttgtagctaagcataaaacatctaatagggaaaacatagcctcttttccttttaatgggacccattgcgtaatttgtggagaatgtgtaaattctcctcataaattgtgcagggcttcttaaaaaaaaattcaagatcgtgacagcagcacattaagtcaagcatggggcccgtctatgtgggggtccctgtgtcacttacaggcagcacacccatgaagctgccctgccttcagagatcttggaagcaagtttgtccaaataaagagaattacaagaaaacattaaaatctaatttaacagtaaaaataaatttagaagaattatctagtcatatcttcttccctgcaaattgagaactgtatgcattttatgtatttttacatagattagcccaatcttaagagtcatctcagattcagctactgtttactagtctctaaatatatgccagaccctatgctaagcaatttgatgcgtgttgtctcatttgaccaccaccagcgtgattatcctcattttaccaatgaggaagcaaggcttggagatctgaaatgttgatcaaagtcatagttactgtgggttctaaggacttaactttagttatctaactaaattgatacactgaactacacctcttaaaaccaatttttgggccgggcgcagtggctcacacctgtaatcccagcactttgggaggccaaggcgggcggatcacgaggtcaggggtttgagaccagcctgtccaacatggtgaaaccccgtctctactcaaaatataaaaattagctcgtcatggtggagcatgcttgtattcccagctacttgagaggctgaggcaggaggattgcttgaacctgggaggcagaggttgcagtgagccaagattgtgccactgcgcttcagcctgggcaacagagtgagactctgtcttaaaaaaaaaaaaattcttttaaaatgttttcctttagatttgccatttgtaaatgtgtaaccacatcactgaagcatgaatggacttcatgaccacgttcctgggctaaacgggcttatgactctccacataggcctaagttttcttaagaactcatttaggaagggaaaactaggcccttctttgtgtaattagcaaccttaagtcacaagtggaatggcaaagaaaaacacattacataaagcaaaactatatctagttgtttcaaagaggaacaaacgaatcaatcctcactggataaggacatttctttcccaaagcatgttttagaaggggcaaatgtcactatttaagactttttggcattaccagtaagattatgtatataagttcattaggaatgatggcagctaatttaaaaggtgatggttttgtttgattttagtttaagttttagtttagttctttgtttcatcctgggcagtacacatttacacgttaaaacagaggctgggtcaactaactcacagtaggtttctgacagatgaagctacagctttttattttatcattaacaagataaactttgagcttcagtagagtgtaaagacaactagatagagaagtaggaggccttagggccagcaacttcccagccacgtaaccctgtatatcttgccatgtgtccactctaaattttgttttctcttgtatagaatgagggcaacattacctattctaacttcaccagtaattgtgaggttcaaacttggcaaaatataataaaacctctttgaaaatgtaaagctatatacaaatataagggatcacccttctcaaagtcttaaaaaaaagcccaaactattcttcaagttaactttgatgaaatatatttttgccaactttatctcacagtcttgttggtgacaggtcgagccttctcccactcatctaagatattccatgaacatttgtgataaccctgcagaaataagtccacatctgtgccggcatccgcacctccctgcccccagcccagttagatttaatgaggaaagtgtactttgggaaacaaatacggtggatctgcccaaattttgactaagactcttccctcatctataatccattctggagacagacagtgaattcacatcaataaatgctttcgggagttggaaagggtttgcttaagaaggttcataaagataaaggtaatctgatcactaaaaccatttaaagtttttagattttttttttcttcttaagggggaattccctttagtttgattgcaagataagagttttgttgttaactaagataaaatatagtgctgaataatctctgaaattaaaaactgaagtgcatggtgcacagaatagagaaaattaaatagcttagacaacaatggataaagagaaaagagttttcatgaaaattagcttagtaaaggtaaattgcatttgaatcttaacttcagatctgggtgctctgctatttggcatatgttgaattgataatgcctgtgtgttaaagaattctgattgtttcttttgcctctctcacagcttataaaaatgcaagcagacccatctaatgaatattaataggagtgatgtctagataacacataaaccccgggatctgtggactttggatggagtagtcagagaggatttctgtggctttatttaataccaaatttacatacttttaaagaataaacatcatcttaatattttaatatcaatattccagagtggagattttagtcaaataaaaagcttaattttgtcttcccaaacattatgttcaccagggtctgcattttaagagacaggaaactgttagctaaaaaagaaattaacttaatcccccttcattaagttccagtctttttctgttacttagagacaagtaataattatacccgtagcaatgcaaagcatgttttacacttttgttatacaaaagaactgcggttgttaaggtgacagcaaaagaaaatgagaacattgataaatactgatttttttttcttaaatcttctctgactcttgaaaataaatttcactcaggtgtctgagaggccttttaattcattaactgcaaaaatctacacatatgattttagaaaatgtcaatcaactagctaaacaatattttcccagctaaggttataaacagcagctaagtgggtggaaaatgtctaaaacgactatacataccagttcttttataatgcataaaaagtgggcattttgttttcaagctggtatctttgggatggaacttttagcaagcacacagtacatctcagcagtgtatattatttaaagtgcattctctctctctctctctggcattgtgaagactttttaaattttagctttacaaaggggggaaatcattaaaatgtggtttgtaccattacattccattatttgtcatctttatggctattctatagttttcattgacctttaatggtaagcttggtcaggagaggtgagcaggaatgttcacatacttggctgagggtgctgcttgagagtgtctgttagctgggcttcaatccacgtccctgtagattttaatgtccctacagactgctggcagcctgcttccagctgtggcaggcatgatgcagtgaattgcttttgaatgttctttactcaaataggcagtaattacaagcttaaagaggtttagtggtccagtaaactacataatcacccctgaattagcctgggctcatcagttgcagtccagcaagctccagtctgctgtttgtatgccgtcttgatcacatagcaacctgatcagcaggtgtggagcagccagagtcccccataaacacaactgtctactggggacaatgatctctaatgagatgaggctacatcatcactgtaatttaagtgggaaaattagcactagagaatgggtaccagttccaggggtctttagtcatattgggagcagcacgaattctccatctcattctccctgtctctatctttttctctctcaaaaatatctcctcaccaaatgtaccattttgcttctaacttacggatactttattctttagacaaggatttttcctgaataattaatgctagacagggcatctgtaaaggcaataatgattgctgtcaacagactcattccaaaatggcgttgtagtatttcatcttccttgtctttctacttaatggtttcaaaatcctttctctttgatttttaaagtggaaaagtgttcttcaggctggtgttaggtctccttttagctgacgtgctctctgaaattgtagagatgggctatacatagtttgaaaaagatccttactttattggagtttattgtataaatcagtcatgaactttcttttcagaaaggtggtccagtatagtgtgccatgtttttgttgtgcatgttcaagtgaaattcttggggaaaagcctccatgttgaaacagtcttctttatcctttcttctgtcctgtgctaggcataaagatacagaacttgaattttgttgcattgaagttagagagtaggaagggaattttgtcacaaataaacccaagaacaacatagagtgaatttgggagaaactttgggggaaattataaattgacgctaagaaagaaaagcagaataacacagtaattaaaagcataggctgtgcaattgactacttagagtcaaatcccagctctattttacttgccagtaaattagattctgagcctcagtgtcctctgtaaaataatggtaagagtacttatcttagagacttgttttaaggattaaataagtaaatacttaaagctctgagaacgctgcccaacatacagtaaacattatataaatgtcaggtaaataaagtgagcaaaatctggactaggcactctactattctgggatttgttgaactaagtgagaaggatgaataattgttggaatggagctgctagttttgtgtttatctgaagtcatctactcctactcacaaatgcaggttgagggattttagtcatctctaactttaataacattcattcacagaaatatttattgggcacagaactggtagctgcatcatcactgggaatagcattcatatgtttttattagtagtctactaaaatgtaatgattttgaatgtcatttaactcatatttgattaagaatcatgtaataaacaaaagtaattggcgaaacacacaccccaatttgtttcaaatcccaatttgtttcaaagctgacaattgaaggcatattgtagtgtggttagaggaaatagtaggcatttgattctatgatccttaaaagagttttttttttttttttgtttgtttgttttttaaggagtctcactctgtcaaccaggctggagtgcagtggcgcgatctcggctcactgcaacctccgcctcccgggttcaagcgattattctgcctcagcctcctaagtagctgggaccacaggcgtgtgccaccacggctggctaattttttgtatttttagtagagacagggtttcactgtgttagccgggatgatctcgatctcctgaccttatgatccacctgccttggcctcctaaagtgctggtattacaggtgtgggccaccgtgcctggccaaaagtgctcttgtatataagctactatcattcctgtataagcaatgctacaagcattaataaagtgatgggcatgtgagtttccactgagttttctgacttacagcaagattgactcttccttccattagcagaactgagttgtagaaataaaaggtacacacacatacgttaagataatagtttttttcatataacaagtaataatcatcatatatattcatgattaactcaccaggagtcagtgggatttcttcacctattatataaaagacaaaatcgtttggaagtgaattttcccgacttgtatgttaccaccaagtttcaaattccagctctactacttaccagctgtgtgaacttgagaacttcctttgtcctttctgtgctcaagtttcgtcatctatcaaatgggtctagcggctgttaactacctcagaaggcttttgtgaggagtcatataagtgaagcatttggaacagcgcctggcacattctcacttcctgatatatgttacaatgactacttcttccactcttattaatactgctaagctactattaataaagttcctttggctggatgctggaaggagaacatgggtcaaggttctgatgaactaactttccctgacagccccctcccctccccttctgcctgcctcccaggcagaagcagtggatattcaggtaggagtggaggagcagggaaatggcaactctttcctctctgttcaccatgattaataacatggttcatactcccttataatatattttttgttaaaaaagggaatggagaaatgagaaacaaatggcagtgggagtgtagccaagtggagaaactcagggccggacagacctggcaccagcactaagtagctgtgtgctgttggtgtgtttttgacctggccaaccctcagcttcttcatctgtgaaaaggagctaagcacagcccttactcagggggttcaccaagagtacatgaaataatgcctgtaatgcatttgttgtactgacaaataatgagtttgaatgagctattgtttaaaatgattcaaaaatgacacttcaaagtaaagcatgagttttctcccttatctactcccaagggcctcctgtcctgtttttgttttgttttttgttttttgagatgtctgttgcacaggctggagtgcagtggtgtgatcttgggtcattgcaacctccacctcctgggttcaagtggattctcctgcctcagcctgccgagtagatgggattacaggcgcctgacatcacgcccagctaatttttgtacttttagtagagatgggatttcctcatgtcgggcaagtcctgacctcaagtgatccacccactttggccttccaaagtgctgggattataggtgtgagccactgctcccagccctggttttcttaatggccatttttgtatttcctcttataagcatggtcttctactgagagaatcaatattcagaggattcattaatagctgttcaacataattttagcatccttcacgaatgttaatccatttaggaagaggatataagtaatcactaatttggaatctaaactgtatgtcttaaacgtatatactttaaaatatttctgtaacatatgtgtagctaatgaagaatatatctaaaacattgttattttataaatttgtaagcaactttaaaaaaaattccaaatacaaaggactatgcagtttcttaatataagtatctgacttctttatttagtgttttcattttctatttaattgatatttaggagaaattaaaagatcagataagtgaggcagggagggcattttattttattttattttattattttttattttttatttttttttgagacagtctcactcagtcacccaggctggagtgcagtggcgcaatctcggctcattgcaagctctgcctcccgggttcactccattcttctgcctcagccacccgagtagctgggactacaggtgcccaccaccatgcccagctaattttttgtatttttagtagagacgaggtttcaccatgttagccaggatggtctcgatctcctgaccttgtgatcctcccgtctcggcctcccaaagtactgggattacaggtgtgagccaccgcacaggcagggcattttagtattggtctcttataattggctataaaacaatgtctttactactgtgtattataaatatagtcttagtacaaaaaacaaagattgttatgaaacattatccagcattctacttttccttccacacctatgtcattttcatgtgctaaggttacatttatagattcctacctgacacctccactggcaacttcttttaactgctgttggatatacagaaatcagagagattgtctgcagaatgactctactgggccccagaaaaaacaaacgctaaacaaaaaatggagcccatttagtctgagcaactaggcaatataggagtgttggtggagaattaagaaagcggatggaaatcctatgactctactgatgatgctccaaacatttctggcttcttagccagtcccaacaccacccttccttcttttgattccagcatgtgcgaggatgcaggactcaactactatgcattcaggctatgttctgcgactgcacggtgcactgcttttgtaatgcaaataggaggcacaaagtgtctctttgataatgtgcagtcagaagacaaaaaagcattcactgaaacagtaaaactaattcataaagctgaaagacaatagggaagcattatggatttttttaaaggaaaaaagtatcctagatcaatgtaattgtcacagtgtaagctattcacagtcaatgcaggaggggaaaatggctgcaagtttatttaaagtgggagaagttttataggcaaaaaaccattatgttaaacaaatataaatatatttggttaacaagtttctgcttagtctcttagaggtcaaatatatagctggttattttcatttagatccacagtattcccttagtgacaaaaactcagtagaagttttaaaagagcacagagatctaatagttaaaaaccatatggtagattttttttttttctttaaagggagtatctccccatcacataccagagtttagctcaaggtcaacttatattaatgcattaaacttagctgtggaggaggcaaagggctggaggaaaaaggataaaagaagttctgaaattgttcttccaacatattcagccaagcaacagaacattgcctggataaggcttatattggacagttgccataattcctcctgttagatcagctcctctggtacctattcccataccttttaaagtatagcatgtaacattttgcttgaaaattgcttctacctctattgctttgttatagccgttttgcagtttcggtatagaggcagttctgtgtcacaagaaattactaatctgaggcttgagaaggggcagtgtagccttccattatctcaccagcaagctctgtacaggattattttcaaattttctgctgccattacaatgtgctattagagtggccaaggtggtgagggaggggatgttattgaaacttggttaccagggtagataagataaacttcatcactttcttggcatccacatttgtagccaagggtggaaattttgatgaaagaagtacatttggtcaaagatattaaggtgtaaagctggatattttctaactgcattctacagagtctgtctcttccccattgatgctcatctgaaatagtctgcttgattgtttcaataaacacactttctttcaatgtattgtaaacttgtaaataccagataaccaacttaaaatccccctcccatcccagtctcaagaaataacactggttatgtgcagacataactttcttgagtaagtcaccattttctgtcactttctatttgcggctggtaaaatgacagctcaggcttaacttttacataagctatttttagatttttctcagacatcctttaactatttcttttatacaggatcctaccctaaggatcattttattctttgacggggtcattaagcaatcactctatactggttcattattggaagtcactgcaatatccagaaatacatgaagagtggcaagtggtttatatttcagcaagagatttatgctagaaaggagaagtcaaggtgttgacgattgaaataaggatgatcatttcatgagttattccctttcgctggggttccactgcccacaagccacttagtttccctttgaggccagcatctcttctctctgcagccaaaccagcctaatacacatgtgcaggtttaatgctggaagggaggggccagctttacccatacataatcactgttttatggctttcactcattcctgaggtgttaatgcagatcaaatgggaaacactcgagaaagaacccttgcagctactgcattgcctggctctcccctctcaatcgttaattcttattgtaagatctaaaggtaattttgtttgctctcttaatgtgttgcagttctcccagtggcccttgcatatcctttctcaaattcccatcttgatcaattgtttgcaaataattaagcttttaaaagataatagcatgaggctaatgtacacaacaaaggcgaggtctccctcactgtctatgggactgtggtcaaatttgctttgatatcccgaagtgattaggttgattggtatatctgggaagtgccatccatcttgccttcacaagagcctactgatctttcttaaactgtgtccttgagatgcaataacagcaaaggtgtttgggaggatggcaaggagtgacataggcctttagttgcaaaggtttggaatgaatttcccattttctccctaaaaacagcacttctcggagattactctttatctcttttgcaaagtgacgtctgcctttgcccattgcatggcctcactagacctgtgggcagaaggcaacagggctttcaatgtttttttttcagcagccatgcctgtggcatgctgggtttttgtcaagtcatttttttttaagtctataaaagaataactcatactgtccacaaaaagctttatttagtaaagatgcataggatttaagatattgaaacatattaggtttcagtttaaaagcctacttctttgtgaatttttggctggttaaggattaactacatgaagtcacggctttcatgtgattctagcaattacagacttttttcagggaattgaaagtttgtgggacactaaggccaagaactatgagaaaaagaaatacattcagttgacctaccatagacaagggtttaggaatgttgttgatacctttttctcctcttaacaatggccagattattgtgacatttaatttgtccaggctcattcatttgtattaaaaaaatatatatatatcccgaacaactgaaaatttcttaatggagacagagtgctgagcctccatagcttgaggctgcctagcaattatgctgcatgaaattagatacagtttgttccaattacttaaaatcagatcacatgaaaagtgacagaggaaaaaaagggtagaactttctaattttgtgatatttaaattatgaaatcagaaactatatgatgtgaagaaacaactgaaatttgcactgaaattttgagagccatattactaccctttgaagctccaggtagtggtaatgattcaaagagaatttttgtgacaccacttgcataaataaaatgtgaattccatttgctttgtaagaatgtttgtaaaacttgctcataaacaggcatgcaaaagtactcttgaaaatacaggaaaataaattactgtgacaattttcagttttcaaagtaactaaagataaatggtataaataataatttttatccagttctggtcataatattaagacataactaataagacagggcaaaaggttttgccatctgactatactaaagaaggactgttgacatatttattaattctattaaaaatcactgcaagtgatttctgtaagacctggacaactgtcagcaaataattttacaggaaatgttatagattggaagttgcttgtgtacttcagtgtacaactttatatgacacatagtgccagtggtgggatgctaatatttgcatatttcaaaattgagcttgtcttctggcactgcaatattgtaagaactgctagcctgggtaatctttaacctcaatggatcttagaactctggatgacaaaattgaggataagaaaagttgtctgttgttcaaagtcccatagttaatgagtggcagcatcatttatacaatctaatagagtcacctatattaggtacaattcttcaactagtagagacatagacctactgtatatcaagctgtaattcagcattctatccatgggataagaaattcatttggtttgtattgtgtgccaaatctttatacagtgggagttatgttttaaaccttagggtaatggattcctttgagctcagtagccagtcatgagactttggctgcaatggctggcattctgttgagtagtcacttatgatcttagcctattaggaggtttatataccttcatttgaagaaagtgggtcaacatcacttttgtgaatgaagcaaagaaagtagtgtcatggatcttaaattggattgtttctgctttgttatacaatttgatgttgcatctgagtggagagtgtctgtcatggcatggtacagccattcctttgttccacaaatatttagtgattttctgttatgtcccagtctgggctttgaggataaacagaaagcaaggcaaggggtttattagcattggtagatgagtgagaaaagacacaccaacaaggaaataaacaattaaagcaggtgcttcagagagtgatgcttgctattagggaaataagaaaaagatgaatgtgagcgtgataaggcggggtgctgggaggtggggagggtaaagctgaacatttgagctgagagctaaaagtgacattggggtaagaatctgagtgacgggaaaagctggtggtgttaggaaaacagaaagaaggatggtgtggcttggtataggggtaggaagcgggtgagaagaaggtatcaaaatctgagaagtgggcaaggctggatggtgacaggccttgcaggccatggtaaccagtctgaaggttatttcacaggggacatgaatggggattatgaaaggcgtctgctacatcctttggtcatggtgaggcttaggcactgaaagggaagcaggaaatatcactgacttatgtctgcctctgtccatctcttcccctggccagtttcctcacctgtaaaacagaagggatgatagattccatttatgtcactcaaagggatataatggggattaattaccatcctgtctgtaatatacttggagctctttagagaaaggcactatattccatgaaagcaaagccttattctaattgtgtatttattgattaagtgacaatcatagacaatgcttatgggaaaaattgtgatctctctgctgttcacaaacaaatcccctgtgtatagatatagagcatatttaaacttacatataagagtactgaagtggtcattaacaagcctttttagcatctaatcagacattattaattaaattaaaagctatgtcaattagcattcaatagacgacaatttagtttccatggcacagatagttaaattaagggttgggggtgcacttttccattcataatagaatagagggttgactctcagaagaattttatcttgggataatttattgagatgtggtgtttcaagcaagctaatgtctctatagatggaaaccatatcctcagctcctcccctaagctttagaaatatgtatttcaaattagatatatttgatcagtgaacagaaagcatttgtgccaaaactaatttcagtagaattccaaacgttcttacaggaaggtatgaatttcactttattatctaatcctgtaatacttttatctactatgactcttgaggaacatagctgggcttgttcttagcatgcaaaatatgctggtctttgaccttatattggcctgtgttcagaatctcagcatgtgttgacattcagatttggaaaccaacattggtgaattttgttttttttgctgaggactgaaaatgaatagtgtatgtgtgtgtgtgtgtgtttaatagcacccactttagatttgatatttgcatctggcaatatggtgttttagagggagaacgtcactatgtggacctcagctgagattgttggtccaaatgggtcagctttagaaatttatggttcaatgaatatattaagttagggcagtatacttttaggtggtaacaaatggcttgtccttattttaatcctataaaatacagtgaagatcatactaaactttctgtgtttgcaacaaataaagctgttaaaggataaactcagtgtcaaggttctgcaagtatcctaagtagctatttatacacttcattaatctttgtaattggcttgtcttttactgccattaattagatgatgtagtattccattaataagagtgacacacctcagcatttttacctttaattatagacttcatgagacacttaggctattgacaaaatggctaaatattgcctgatgcacacgtatcttttttattctctttcagcacccttacccttctgaagaacagaaaaagcagttggcacaagacacgggactcaccatccttcaagtgaacaattggtaagtaatttggctttgtgtttacacacaatctgtttccccctctggcaacctgcagctcatgttttgcattaagaagacacacccagttgccactgctttccctggtggcttgttgattcaaaagtgaaaacaaactgttgactgatatgtgagaacatttgctagtatgggaaataaaacattgtattgtcttctacctcctttataagttgacaattttatgcatagtataagtatgtgtgtaattcacattcactatggctctgtcaatgtatctctctctatggctttttttttcccccttcagggtaatcgatagagtagtatcatcctattttctacaaaacaagaaaatccaccatcacatatcagtcaggtttaaattcattgaataactaaattcagttagattttgttagggctatgcattcaaggatagcctctcctttgctcttatctcctgaatactgaaaggaagaaattatttgtttctctttgaggctattccaaacctgaggcatctcgtggctgtgcaatactgtttctaaataaagtgtaaattcctgatttggggcgaagctgagattatgtaccaagtaccagccaacaatattctgactcaatgtacagcagtgtggcaatgaggctttgagaaagtatgatttattaccctttgtgaatgtgctgaaagccaggtttcatataatcacccaggactagtgtcatatttgaagggtatcgaaatccaatatcctctaaaagtaagtgtatctaattaattgtcctaatatttttagattagtgtttatgatggggaaaccttatcctctttgaagtaaaatccagaaaaggcccaaagcctgggctggggaaggggagaactaggaatgccagtttgcagacagaagtatttctttctgttcaataagtgtcaaagattaatattacagaatctctgattacatggcctaatccattttggtgaataaatttgttcttgatgtctattgcacctacattaacagacccttctctgttagagagcctgggagcctttgggagagatttcagatatattaaaccccattacagaaaatgtaatttctgtcaatataatcccatgtattcttcaatttagtattttagagataacaagctacttacaatatatttgcctttggaggattaatttacaaagtgcactatctgcaagacacagacagactcacataagaattgcttgtaagggttatcaatttctatgaccttactgctgccttgagagatcaatttttgcagcccttttcatcagtggatggtaaaccaagcaaaggcatactacatctaaatgtgttactacgagttgtgtggctgctgaggttttttgtttgcctatttctacctgctactgtgtcttaattttcaaggctgttaatactacatattggaaatttcaaatatgtaataatttcatatttgaaatatgaaatttcaaatatgtaatatttgaaatataatatcctggatgatattataggggagaccatcaattttgcgtgcacatctagattcatatatctgtattttaaaacttaaagctgatgttgagacagttttaatacaatggaggctgcacaaatgtccgcatttccctgggaagtgttcctgtttgcgggcaaaggagtggcaggacaagctctctagttaagaaacgaaaagcgctgtcattcaggggatctatcctgtgagccatctctcttcctctgcagggttgctagcaaactccactcataaacacagttaccagagaacaaatcccaatacaagttgcttactatgggtggacggccttattatgggatatttcctgtgaatgcaggaagaggaaggcattcttgtgacttcaagcaatatatatatacacacagttttctaaattctatgcacagtctctgccggagagcaatcttcctaatcagtccatgatcacaattcgactttctcagttttgtaaccagaagggagagaaaggatgtttaaaaagttttaattcacactctaaaataattttaaagtatatgcagactttaccctaaacttcacactgctattcaattctgcacgggtaaataacttaaaaatagcttttaattagttatttgggacagaaacacaattctgtgcttaactgccactttgtgcagtgtgtggtttctctctacttgtatatatatggagttagaagtggcttttgcttgcaccacagtgctttgcatttggcaattgtttcaacatttaacaatgttgtttgctgtagaaaatgtccctcaagtaactaaaagttgtaagagagattgtttttctttagtttgacaaataatgacaataccatgtttgatttgaatttttaatggtttattaatttttatagaaacctcttcctgttttgttttgttttgttttgttttgttttgttttgttttgttttgttttgataccgagtcctgctctgttgtccgggctggagtgcagtggtgtgaacatggctcactgcaacctccaactcctagctcaagtaatcctcctgactcagcctccccagtagttgggaatacaggcatatgccaccatgcccagttaatttttttttcttttgttgaggcaggggttttgctatgttgcccaggctggtctctaactccagggctcaagagatccacccacttcagcctcccaaagtgctgggattacaggcgtgagctactgcacccacttataaacattttttataaaaaatgtttttcatcttagctatactgagcatcggtacaagttattttctactaaaaataataattttgaaaatgtcatcattagtatttctgtgtttccctttcatttatttatccacaacttttaaacatctgtgtcttccttcttggatttcttaaaacttgttaatacacatgtacatttttgtatgaactatgagtcactgttgaaatgcaattcaataaaatgctgaaggacaggttgagtgtagatcagtcataattattagcagtaacataatgtatcaaaatatataatatgtaagtgaaaaatataaactcatgtctagttgttagagtgtcatagaaatcctggctgatgcagttttaagttaggctttgactgaaaaatagacaagaagtttgctacattttaatggttctttcacttcatcactgaactaattttacatttctcgaattgacagtgatatatactacctgcctcaggtggctaaggctaaagtacatgggatttgaggggagaaaggcaaaagaggagagaacttaaaagtaaaacaataagactgatttgattaattaagagaaaatctggaaaaaagaaaatctcgttataactcttattttggtccaattgtcagaataaaaatggagagaaagaatcttaaaatggttggcatcagtacttacagcatgtgggccctaggatggaatgtgaaatttattagatgtgacattgtgggccaagtctatgccaataaattttttgagaattgaggcaattatgtaaataatttgagtaaaatatttttaaataaattatctaagtatttgatgtgactgcatatttttaaaaaatcaacctccataactagttgtctaaatatttcaatctagtatgttgtggttgacttagatttaaaagtgtaatcattttcgaaacataatatgcaccagagatttatgtattcttccttctttggtcccttgctcccaattataattttatccaaaaatgataaataatagcatcaggggcttttgtctctttgcttttttactgttgttgtggttttaacaaatacttatgttatatcagcagtgcaaacattaccaatatgcaaatgttttagtaatttaagtagaaacatcttaaattttgagattagatggttgtttagacctttaagtatttaagtagaactttatggaagacacacacacacacacacacacacacacaatcaatacttggttgttttttctcctgaatagaccaacttaatttttttatattgaaaatgtgagtgtagaatggtcagataaaaattcccttatacatgatcacaccagtgttgcggacctgggaattccctgtgatgaaaacttatctcttgtacttgtgtcgtacttactggatgcctcagttgcctcctgcctcagcagagttttggcctagggtgtactgaatacattttacagtttctttgtttactactcctcatccaaacactttcctattaagttctgatattaaatgattatccctttatgctctgagaaggcaatatgggttttaggtgcaaaatatatagtgtatgtgaaatacagtatttatatatagagaaaaattattctccatcaagagagcatataaaattccaggttccatcctagcagccaagatgacactgttcagaactatggtactctacatttcttagatttagtgctcataccagattttcctagttatttcatttattgctttcaaagctgcaaagcattcaggcatcacttcccatttattatgagtgggaaaaaagtatgttatccttggagatttatgccactggcaagtaaaaatgtaaacttattttttaaaaataagatctcctttattataataaacagattcagctgttaaaggtcaagtttctttctgagttatggtaataatatagcaaatacttttacaaataatcaaagattctataaatataggtacctgtttagatgtaaatgttaaaacattcacaaattatcctttcaacttctgtgatctaaaaatcaataggggtcatagggtttcatagaattgttctgctttttcttccaacataatttaataatacattttacagatgttgtttgaatattagacacagattgttttgtcaataaagttaaacagaggtatgacacaaaagcaaggaaaacagatgtaaaaaaaagaaaaaaacagtacacgatgcaagaagctctgggtcacttgtttgctattcaactacaaaattaaagtgtgggctgtatggtgattttccttgcctaggaatcacctagggatggaacagcttcacacatagaaagtaattgtattaagcaggtggtttaactttttcccttgagaattgaagtgtaacctacatttaaagtagacttcctaattgatcaatggagtaacaggtgcggtatattaaaaagaaaaaggagaaatataaatggaagaactccccagaatatttcagaatgggttgttgttcttcaagcctcggttaattgctatgcttttcaccttgagtgtcaattctaataatattacctttacagacgcttactctgggcttagattatagcaatcagtaatactcactagataaaatactgtctagttgctcataagaaaatattgaaatcagtcaaaaaatgtttagcttgcatattgcctgagacagagctggcggggcgccagacaggcagggtattattaggaaagctgagcaaatagctcgcagggaaaagagctgtgaatttagaaaccttcaggtattgtcatgtcagagagtcttaagagttcaacagagacactgctttttttttccttcagatttaaaaaatttccaacaaacaatcttctttgaaaatgactctgcagtctgttaaatatactttgttgtaagttttacaccataagtttactcagagcttttccccactgcataaaatcacatcgttaatactgttaaagacgaaagctccttatgaaagagtacactttgaaacactgtgctggctggaaaaaccctgccccttccaccatggggccctaagtctaggtgagaaaagaaatgaaggtctaggatgtaggaagggtggatttgaaagtccaaatatggttttgtgtaaccactgtttctcctccagccagcattcaaaggcagttgctgagcttctcaggaggacaagacactagctggaagctgcaatccagctggtacaacctgaggaattatgtcgggaccctgtagggttggggttcaagtgaggctcagagttgagtgagttgggagactgatttacccagcagggacccaatgtttctgaatatccatgattcatttcaaggcaatgaaaccagtgacaacggaggttgactttgaacatggtatgcaggtcagcacaacttgttgcaaatcctaattaagccagtcttcttgttttcagtgtgtctgtaagtatctggtcagagaaatgcaaacaacaggctgtgggtcatgcaacccgatggggcaggacttgactcccatttccctggagagggcatagggatgaggggctgagaggtgtcacggtcaagggggaagagcttggctacgcctcatccataggtggctaaggtgtaagcctcatgacaatttaaaatttacacagggcaagtatgggaaggggaaatgcagggacaggtcgctgcaatcaaaacatttcatccctcatccctactccttggatttgggcgacagtgtcctctggtttaaaatggacaagtaggacgaattagtcaggactcaaaggactcttttagctgtaatattctagactgtgtaataatgtgaatcaaagagaagtaaagtgtgcgctctgaaactctcattccagctttatcctaggagtggggaaggaaaaaaaatactttgataaggagacaaacagagaaattaattaaaaagttgtagttgtaactttcctcatcttacataagcaaatcaaacactgtaaaataaaaactagatgaaattaaacattatcacaagacatgaaaaagatgtgtgctgtcattttaggattcataataaagataaatcagttgtttttagcagtgtgctatgagtctatgaagggcatgacagataataggctcgaaatttctgaagttattgtacagcaaaatttgttttttcctcaggcattcaatctttttctccagtaattttgaacatgacaaactttttagtggatgcattaataatctataagtaatgggttgtcaggtgtcagttagataagattaaaagactgtttaagcattatccatttgcttctttgcatgagttttataggtcagcagaaataactttttgaattgtggttgtgtgtacgtgttctctctctctctctctctctctctcgtctctctccaccccccaaacccccctccctctttcatttggctccactccaagcatacgtggaagaaccgtattacattccataaatcctgtatgtaagagcagatttgaaactcactatgtgaatcaaggggacaaatgtctcagctgtcttctgtaaatgtattttagtttttaaaatgttactcttcatcttctcaaaggaagctctgtaaggggaaacaaactcggctaagaggggcattgaagctttagacattagtagtttcctagcaagtcaggtttaggtctattcttgtcaaatatgtcttaagtgtgtttacatatagtttgcctttctggtattttctgcttgcacagacctgatctccacctattttgtgtcaacagttgctgaggctggtgttgggtgattaaccgttaagcacggaagcgcagtacccagagagaccctctctctcctctcacttacatcatcatctggcttcaggctgtgcctacagaaaacaaacagcatttttgagtggttaaaaagtcagcctgaaatattaaaaaatggggcaaatgttgcctcctggttgaatagaacagttttcttgaaaaatggagtggagccaggggctcgggggaaggaagtgtttccgagggcaaacgttggtcttagatccggtctgcattgctccagtgtgtgcacgccgaggagctttctgtagacgctgagggttatgttctgcttcgtttttgattttcaaggggaaagaggacatacaaaacaaaaacaaaaaaaaacctacaacaacatggatgcctgtaactttggcaaatataaggctgtcctgttcaatgccctcataaatcattaatattttcctgtctattttattttcattcttacaacgctcttagcctgaccccttaatatggaaaataattaactctttcatgctcctgatgcctgaacaataacaaataaacaaaagaatattaatctgttccgacatatttgagaggtttcttttcctttttaccctcttaactaaccagtgcctcacaagattagatcctatggttgaagaaggggaaaagtatttcctttttcaaacacattaactcctccaggtctgggggagatgattggagctacatgtaacttagctcaaaaataaatgtcctgcctttggtgagatctggcttaatattgataaagtcacttttttttttttttcaaaaacaatatgttgcctacggatggaagttaatgcaccatataattatacacacatacacacgtgcatgtaagttttcagtatttttactctaggatgctaactaaatcaaatgcaaaccagtagtcttgaggtttgttgtctggttgaagggttttgttggcctatatcactaggacatctgcagtggttgactttgtttgtttgctagtttgggtcatagttcagatgtacttggaaagggccggggagtgggtagggggatgttttaaaagcttatggaaagaattgaacatgtacaaaaagatataggatctcagccccctggctggttacctgacaatactgtttacagaaaggaaagtatagtaggttatggcagagattcctatcctcaggacttggggcggggtgggagggggcgcagagagggggtagcggggcacataagaagcatgtcacaatcattttgagtgaatatagtatttaaaaagcatatcgagaattaaattttgtttttagtcatgctatttcttttgaaattgcaaataacaaaggaatataagatttttgatgtgtcaaaagggagcatggattaaaattttagaaaccctatgctacagaaccataaagtaaaaatcctgggagggagggaatttatgcatcatacgacagatgaggctcagggctaattagaggcagggctaggactggttcctagtccagtgcttcttccagtccactagaatgtacttatttttaacagctttattgagatataattcataaaccatcatttcacccatttaattcaatggtttttagtgtgttcacagagttgtgtaaccatccccatagtcaattaaaagacattttcaccaccttaaaaagaagccttgtaccctttagctattgcccctctttatacttccgtctctctctccaacagctcctggcaaccactaatctactttctgtctctatatttgcctattctagacatttcaccaatgtgatcatggaatacgtggtattttgagactggcttttttcactaagcataatgtttgcaaggttcatccatgtcatagcatgtattatcagcacttcattccctttcaaggctgagcaatgttccattgtatggatataaggtatcttttttttacctatttatcagtggatgggcatttgatattcatctcttaccattataagcgttcatatacaagttttggtaccattaagtatttttgggaatgacagtatagcaacaaagacctgtcttaggtttgtataatttggaaagcacttttcattcgatcatcccaatttcagcacctaaacactgctagaaaacttgccggtgagtggcagttttcccactcagttctcatattcttctcactacacactgctctcactttccccgccactgggtagtgttttgactgtgataattacgagtgatgttcaaagaaaaggaaagttggctgggcacagtggctcacgcctgtaatcccagcattttgggaggccgagggaggcggatcacctgaggttgggagttcaagaccagcctgatgaacatagaaaaaccccgtctctactaaaaatataaaattagctgggagtgggggtgcatgcctgtaatcccagctacttgggagactgaggcaggagaatcgcttgaacgcataaggcagaggttgctgtgagccgagattgcgccactgcactccagcatgggcaacaagagtgaaactccatctcaaaaaaaaaaaaaaaaaaaaaaaaagaaaaaaagaaaagaaaaagaaaaaggatagtcacactgaaatccagcaactcagcagtaaaatgcacaaagttccctcgaaatgacttagatgaccataagcattttcaaagatttgacagattccaagatgtcattttgctaatgttattgtctttattcgagagattgttttcctttaagtgtgtttccatttgtattttaaaggtctacaggttacatattgacatatattattacatagagcttaggtttcaagctttactcattaaaacagaggtcacagtgaacattccaaggatgcatgcaagcctccattcaagtcaaatcatcttcattgtgccattctatagcctaatttcataaccagacggaactagaaatcaagctaaattttgagatatcctctcttgacatgagcagagactccaggtctagaggtttatggttgctgaagacttggagaactgaggcaactacaggcaagatcctagagaaaggaaggagctcaaaggtactccaatatggagctaagattctttaatacctgattagggccaggcacagtggcttatgcctgtaatctcagcactttgggaggctgaggagggcagatcacctgaggtcaggagtttgagaccagcctggacaacatggcgaaaccctgtctctactaaaaatataaaaattagctgggcatgttggtgggtgcctataatctcagctactagggaggctaaggcaggagaatcacttgaacccaggaggcagaaattgcagtgagctgagatcgaaccactgcactccagcctgggtgacagagagagagagagagagagagagagagactctgtctcaaagacaaacaaacaagtaaacaaaaaaacctgatgtatatgggggctggttgccattctaacacaacggggttttaaattatttgggggaaactttctttggaaaataaaacatatttgatcattaaggtgaccatgcatcccactttcctgggaggctcatggtttatgcctgttgcccagtgtaattgttaacagtgcctcttcactctcaaacgtgtcccagtttagatgacaaattatctgctcatcatatttataatagagattggcagaaaactagaatttgctttaaatagatacatttattcagtaatgtgtaagggatgttttgttagattcaattttattgacttcttgtgaatatggaaaaattggaatttaaatgaaaaatggttcatctattaaactaaagagagacacttctgttctttgaagacattattatacctattttagctttttcattagtagaggaagttttgctatattatcctagatcatgctattgcttctacattgtgctaataatcattttaaatctatattctaaaccactattttttttagctccataaggttatacaaactcaaatttggcaaattgtctgttacatgtaagtaaatattttatgtttacttaaatataaatataaaccctgtctcattctgttgcctaggccggaatgccatggtgtgatcatgattcactgcagcctccacctcctggatttaagcaatcctcccacttcagcttccctagtagctgggactacaggtgtgcacaaccagacccagctaatttttacattttttgtagagacagggttttaccatgttgcccatggtgatcttatactccaggctcaaatgatcctcctgccttggcctccaaaagtgctggtattataggcataagccacaactccctgccatcactttttttttttttttttttttttaggatgaagtcatttcaaaatttgctttcaaggaaaattttctgtaatatataccaagtgatgaattatttgaaatttattttaatgcctaaggccaaaataatacatgagttttgatattactttgcatcatcattgtcaactagtgattggttcatttcacaagctgctttaaagagaattttagtggctgggtgcagtgtctcacacccagcactttgggaggccgaggaggttggatggcttgagctcaggagtttgagatcagcctgggcaacatagtgaaaccttgtctctacaaaaaaaacaaaacgacaaaaactagctaggcatggtgatgcataactgtagtcctcggaggctgaagtgggaggatcactcgagccagggaggtggaggttgctaagctgtgatagtgccactacactccagcctgggcaacagagtgagactctgtctcaaaaaaaaaaaaaagaaagaaaagaaaagaaaattgtatatgtaattaccttcctcaactgtggtagacaatttcagttctttctaaagtaatttggcaaatacccccaacactgttagagaaggaaaacttttcatgtggctgattgatggacttcttatgatttgaccaaatttcaatattatgtttatcaagtgggtagagaagagaggtgctcccttttcccctcctgtctattctcctcctgccgctgttctctacctcccctacccgcagacacactgatgatgtattgcaatcttggaactgttggatcctggaggaggttaagaaactagaaaaaggtgccaaaaacatgatttcataaggtttgacttgagaatgaatcaactttcttgaatatcttaaaatcatgtttcatgaaattttatttcacaaagaaagggagtgtagaagacttgaactctgaagaccaacagttatggatcattaaatccaatatgtaaatgtaaatctaaaataaagagttccaacagaaaaatttcagagtgatttttttattgttgtttaaaagaacagagagttacatgggagataactagacctctttccctgagggtttgtttataaaacatgccttaaaagttattaagggatgctgactttaaaaaaaagtagtagatatgattttatttaaatgactatgatatagatgaaggaaatgctatggtgaggaaattcctggaataaaaaaataacaaaatgttgggatttgacaactaccttccaatgataaattttatatttgaagatttttcatgaggtttaaattctaaaatttgaaaatatttatagaaatcacaaaaatgaattatatatcaattatcatctgtgcatgtttattttctattgaataaagaatagtatatgcagaaatcttatatttaagaatgcacagtgttaatttttattactaagtttttatagagatattcctaacgctagctaaatattaataaaagattattataatcagcacttcccttaagggatagtgtaggtatagaaggcattgccactaatcaatctaactaattaacaaaatcttttcttaatagttgattagcttcttaggtacttgcagatgttgtaaaatgatatttctctgtctagttaggaaccttctgaagtaattctatgtccaccactatcctgctgacagttcacttacgcctagttggcaagaaacacgacggggggtgaagcagagccatgtcattgtttggaggcaacaccattgtgattttctgtggtttaccaagttggctgtggcatgctaacataaccaaatgtgggcttcctttaattatcagggagtaagtagagtggtaaacactgaggaatagaactaattgagtaaaggtgaaaatgctatttctgaaagtgagcaagtaattttttttttttttttttttttttttttttttacttttatcagtattacagagagccatacaagggaggaaaagggcaaaggtatgtggaaaatgttgcctgtgaaactgggaaactaccttgtgttttggctcctaacagatgcccactgtgatctcctcacctctcctggttctcacagagggaaactaaacttagcaattcagttttgggggaagagaccagggaaaggagtggaggataaactaaaggacaaaggtcagtttcaaaaagctgttctgccagatcttgctcagaaaactattcaggtatccaaagactgagaataaaaggagatagatgaaattagtccagtggaaaaaaaaaaagcctaatgataaataaacatctggggacaaaaaagaaagaacaaagcaaaacttcctgtatttcttttttaaacatgagtcacagtcacttcccattctccttgtcagattcctataaaaaattcaaaataaaattcaatttttagatgatccaggtctcagatttttggagattttgctcccctgccaactttcctctttcgctttttaggacttgagtcttaaacaaacaactaagtaaaaaagaaatatatttctatttggacatgaaaaaaagctatagagcaaacccattatcttcctttcctttgtaaagctttttgttttgagactggagatagtttggtcagaagaagaaattctaactcatgattctatgaaaaaaaggaaatataaagattcttctcctaattcagtcttccaccacctgcagggagtccaattcttaaaaagtacttcacaaaagaagactgtgttttcaaagcaaactagattttaagaaaccctatgttcgaatgtaaatgaaaaagcaaacgagacattttctaaccttaaagcatactaaaagatttactttttcaagaatcccaatgtatggcaaatttgaattatatttcattaaaccaaggtgtgtaactatctattttaatgagtgagcaaaactgtcatgtggctgtgtactcctgacattccatatctgagttttaagggctatgtaatattaggaccttaattgtaaaagtacaaaagtttcctcttacatctttaaactaacatactttgtaaaagagaccttatcagtatggaaaattctaagattgtgtgtatttcatagatatgtatttgtattttatctcaaaccattttgtggctgttggagaatgtattttttatagtatattcaaattggaattttgtcattcttttttatatttctcttccaaaacactatttcttctatgttgaatctctaatatatatttgtgttcatacataaatgtagatatatatttgaacacacagacacacacacatacatataggattaagataactattttacttatgcctcttaaaatgacaggattttaaagtgacaatatgttcatttaagttcacatcatatgtacagttctttttttggttcggtgtttagagaattcttgataatttagactcttccacaatgaaaagtaaagcattctgtcacaaaagcagggaggatgagacacaaggtcaaagggcattttagaaacaaacagctggaccaatttatttaaacagatagagggatggggaactgacctcagtttgacttatagtgggaggagcaagaatgtcattttattactttgcccagaaggaaaatgtttttgtatctgaattcaccctgaagccatctaaacatggctctgctgtgtgtagcataattccaaagagagaggatgtataaaatagtctgggataatgataaaatacactaaagagaatcaaatgtggagattgtttaaggtcgaaaaggtgatgttgttttaaaaataaaatattttgctatttactttgttgttttcacatagatgtccatcatgaccccaaataattagttgttcatataagtgtagtaattgtaattcagtaacgttctgagagattactacatcctatatgtactaatgatatttcattatattgaattttttaaattaaatgtttcacaagtaagaagttgcaggtagacctactaatgtggtcaaacagctcagaaaaggtgattagtttttctcaggttttcagtgtttttgtttatgttttattttttaattaaaggtttccccctttgatatctacacattctaggggtagctgacatctgtgttcttaataacaacaaacagttcttgccaccaaaaagaagcaaataacatctagtacctgtgggcagttggctaagaggctgtggtattttttgtgtgtatttgctttctacctggggatcagagcaggcctggaataaatgtcgttggtgttgtccactgcaaggcttcaggaggacatagacaaagatcagcctactgagcagagagtggtccaggtattgaatggactcaatatcctagaaggactcacattctagcaggcactttttaagaatcactaatgtttaacctaaggattagaggggagaaggctataaagcataatggctatgtttaactatttgaagggctatcctgtggaagtaaaattagaattgcttacagtaccccaaggagttgtgctgataaaactattaggttgggtgcaaaagtaattgttttttttttttttaattatactttaagttctagggtacatgtgcacaacgtgcaggtttgttacatatgtatacatgtgccatgttggtgtgctgcccccattaactcgtcatttacattaggtatatctcctaatgctatcccttccccctccccctgtaattgttgtttttgccactgaaagtaatggcaagaccgcaattacttttgcaccaacataaatatttttgatctagtaaggcagaaccttctaacagccttgtttatagatggggtggcctcttaagtaaggtggtgagtgctgtattagttcagcagaggttacctatgtacttttgggggacagatatcatataggggattcatgtcagtgaccaaacgaagtgaccattacagcccttttgaaacctgaggtgtaatttttaaaaatgaactcacgactttaatagtcatagactcaaacctgagttgattattatgaattagtttatgggagtctcaatatgtgaatatgatggagacaagttttggaatacagataaatcaagtcactgtattcactctctctctctctctttgaatagccttatctttgcctatacacacaaacagtgcagccatcaaaattttcaatttacaaaatgttcacagtcatgcttcttccttgactaaacactggggttgctgccagtggtaattggcttgaaaccagctaatttttatatatctatttagtctggatattctagatgagtggcactatagttgcggtgctctagtcactgtgccagagcaccagggaggagggtgcttgctaccactgacagctgtgtgtcatttagcaaattattaacatctctttggtaacatgtgacctcaaagaagtcacctaatttctctgagcccaggcttctcatctgttaaaaatgtctcttcctatttttaggtaagtagtataagtcacatccataaaagattatgtttttaaaaagtctggaaaaagaaagttaatagacagaattccttccctctaagagtctgcagataatgaacagtaccatagataaagagatgtttttgctctcttacctacattagttactatgaaaattacttttggtatatgcagaatattaatattaaataattttctaattggtcatgcagtgaaggcagctaatgaaaaaacagattttttttcattttaattggttatttcacatggtgtttgtgctacacctgtgcttataatgagaatggagaattaatctaaccttctgctcacatgattccagttttcatggtttatacaagataatgataacctgatttgcaacacaatttgttgtagacctgtgttttaaatatttttattagcagttcagggacttcatatacaagaactgatataatatgtattgccaacaagaattagcacaaacagtataccttttagttagattctagtttcattatttgtttcaattacttctcagataatgaaagaacacaaggatacaggatattgagaatcttaaaatgttatgaagtatgcatttttgttttgaaaacctgtccctgtctgtttaatggtttggtttttaggaactattttccttcctgaagtgggcagatttacaaactagaattcatactggactatggatcctttaatcattaatagagccttattaaacttttcattgtattttttatgtcctgctcagatttgatctgagttgggaactaaaaggaatttactatttcagaatctaatatgtcctcttcattttctggatttgatacgtaatttttaatattatgcagaacaaacggatcttaagagaatctcatgcgtatgactctggagagcgtatattaatacttttttacatgtcagtgacttgtcacttttggagaggctacaaaaataattgtacaaaactatcttattaaggcacttaaagtaacttaagtgccttaataagatgtttataaattttcagtactagctggagaaagcaaaactataagttcaattactgtatatctgtgaccttgccttgacctcagactttacataaagagcaaaaaaaaaaaaaacaacaacaacaaaaaaagccaccccaagaaatctctacaaggaatgcatttctctgaagtcctaagcagtgtgagttagtggtgataaactccagacattctctcatttgatggtgtgctgccatcccagttcattatcttaatagtgggcattaaaatagaattaggtttgcaagaggtaggggtggttttgataaaaattgtacaaaagaagtcagagaacataagattgaaatgtcactaattaggagaggtaacagatgcccttatgagcatctaactctttacaccaattttctctctttgcaaatgaaaggagtggtggctagtattgtttcctgaaaactctgctaattcccccatgaaaagatgaaatggaagtgtccaactgtggtaaaacaggcaaacataaatcaactcagaaaccccaagcctgtgtactcaaaggtcactgggggttacaggttttccagcacgtgaggctgcacatagagcaatggagagaactgaaggagtcccattttgccaagatctagttttactccaactgcgattcatcttttcctcttcctcaacccccccttttatttttaaggaataacgatttgtttcactttcttggttacaggtttattaatgcccggagaagaatagtgcagcccatgatagaccagtccaaccgagcaggcaagtcccccatagtgactgtattcaagtcacgcaagcgaaaaccatcctcaagccattcaccgggaggtccgctacctggtaaataaactgggagtgagtataggaacgcctggcaattaaaattaaaccagtttcgtttcataacaacactaatcaatttaacatcattataaaacgtttggagaaggtggaaaaaaaaagccaacagagaaaagtaactcttaaataatatgctcagttacaatattctttgtacacattcaatatattaatgttattttttttctgagtttgccttcccagctctttctgctactatgaccactccctggtgcatggcttggtgtggaattgctgtaaactttattacctgtcaaaagggcaaaggggtcaggattgcttgtgggactcagtaaagttcaaagacattcaatgaggtagagcttttgtgtgctttaataacccaaggcagcttacttctgaagcagcttttcatgtacagttaaaacacgggattcaggtagtggtataaatacatggttcttatttctcagaccttctcttgttaatatccatcttctggtgttcgactttttttttttttaataacagtctttttgttttgtttttaaattatgagcttaaaatggcgatacttctatgggatcctggcttgtggatctaaaaatccaagaaacatctctctaggatttgtttttgcattataatatgccagtaagataacaagagtatttgctaggggtgatgtgagtctttactttctttatgaaatactctctcatctcttagggagcactatggaaaactatgttagcatcgcattgaggcaacacacatttactcctgtaactttttttcttccaacacccattatgtggtcaccagacaaaacccaagcagaaagtttccacaccttaactgttccctctttgagctagatgttttaaaaactcagtcacagaggtgtgtagatctagtctgagagaaatttcactttgaatgtttaaaaaattatactagcctgctatgttctgtctctttctctggtatgttctcctcttagtctctcttgggctatttcttttgctctcagagactgttattaaaaaaccacattctgtacttttgtagtaagtcaaggaacaccttataatcctgatggacagcccatgggaggtttcgtaatggacggtcagcaacatatgggaattagagcaccaggtaagactttgtttttgtggtagttcctcatttttgactccaagagtgtcatcccctcatcaacacaggtaaatccgcctcatccttttctgttatctcaagctggctgccttgccttgtctgctatctgtgcatctaagatattgcagaggggaagccaggatctttatgcactgaagatctcactatttctcaaccctctagatcctgttttttttttaagggtcttttggcactatctgttgactttgctcattttctggcctcttcttggatttttatctcccttctaggacctatgagtggaatgggcatgaatatgggcatggaggggcagtggcactacatgtaaccttcatctagttaaccaatcgcaaagcaagggggaagtaagtacaaatggggtctttgttttcactttgtcctaggaatatttttcctcttgcattttcttatgttctccttgcccatagcttcatgcttgttcattcctttccattaaactcctggtttcttgcttccatcattttctttttggttgtgatcaagcttttaagcttataaatactgtgtatgatgtacatttatcctgtgtgttgctattgtacagtactgaccacatgacaaaacaagaagcagtcaggaggtgggggagtgggttgtcatagcaacagactgatttgcaaaatgtaagcagtctgcagcagtgcaaggagagggaagagcatgtccccaaagtgtcataaatctgtctaaccgcagttgatgcatgagttacatttctacactaacctgcaagacaccgaaaagctaaacagagacttcttttaggtaaaataaacacaagctttacttagggtaagtaaaggcatattttgagctccagtcaactaaactttgattttttttcttagtttattcctttgtctgtccatcataatgggattacgtgtggcaatgggaaaagggagaatacaaaatagaggtgtgcacagcaggctgcggggcttagcccaggctaattgactatatccaaattaagtatgccatcacttgcagtgtgacaaatggatttgacttattcagtatacaaaaatagagatcattaatgcaatcatcagtggcaggcctagtgaagtgggcctaggaaaactgtcccagattctcactcttgcattttctctcctataaagacactccagcaattcgagttcaaacaagtaaaactgttttgaacaccaaggctcttgttcacttcctaaattacccctaatagcactgttcttgctttgtttttgaaattaaaagcagttatttcagagtcttgcttgtgtctctgattatatttatgcactatttaaaatcactgctgaggccaggggtaattcgtactggtcatcttctctgggtgtgagtcaaatataagtttaacaattagctctgaaaacattccattgagctggggaatgcaacagtcttattacctcatcatggaattctctagcttagttaatttaaatattgtttcttagtttctgggtcaattaaatttaaatgatgtattttatgcttcgtgaccaattaaattactaggttattacaaaaaaaattatcatcttttttgattaaagagctgtgggtacagtatattttataagcaattttcattagttcaaaaatgttcctttaggctagattaagcagccattcattgttagagcctggagaccttattcgaaggtgttcatcgtattcacagtgcactattacttagaactaaagccaattgaacctacttagcaatagcgttatgcctttcacccttgatgattatggagcttatagctctcagaaacaatacacctgtcagtttccatcaactatagcaatccatgcagaagacaagaggccccctcaaagcaggaggggtattgttttaggtccaatttttcttattgttctcaaaatcattataaggtggacagtgttttgtgaagattttcttttccccagctctaagaaaccatgtggaaagaattcattgataactgttttgatttttttctttttttaagtacaggttttgctaagtaatcacccttagtgagcctgtgtagttcagctgcctgtgagatgtttggtgaccagctcagtgtattcttgtattcttgatagagaatatttcaggagacaaaagtgcttcttcagaccagacctcaaataacaattttattctttttaataaataagacctcagtaggcggacctgataacagtgacaatgaaaggaaaatagtggcaaaatgtgagtttccagcatgatgtttctcattttattttcttctgtatgaatcaaaagaatgctttacaaaaccatgttcccttaatcacagggttctctggcttttataggattgtcatagccaggaccacactattgctttttcataacattttctttttgtttctttcttttgaatttcttacagggctgcaaagtatgccaggggagtatgtagcccggggtggtccaatgggtgtgagtatgggacagccaagttatacccaaccccagatgcccccccatcctgctcagctgcgtcatgggccccccatgcatacgtacattcctggacaccctcaccacccaacagtgatgatgcatggaggaccgccccaccctggaatgccaatgtcagcatcaagccccacagttcttaatacaggagacccaacaatgagtggacaagtcatggacattcatgctcagtagcttaagggaatatgcattgtctgcaatggtgactgatttcaaatcatgttttttctgcaatgactgtggagttccattcttggcatctactctggaccaaggagcatccctaattcttcatagggacctttaaaaagcaggaaataccaactgaagtcaatttgggggacatgctaaataactatataagacattaagagaacaaagagtgaaatattgtaaatgctattatactgttatccatattacgttgtttcttatagattttttaaaaaaaatgtgaaatttttccacactatgtgtgttgtttccatagctcttcacttcctccagaagcctccttacattaaaaagccttacagttatcctgcaagggacaggaaggtctgatttgcaggatttttagagcattaaaataactatcaggcagaagaatctttcttctcgcctaggatttcagccatgcgcgcgctctctctctttctctctcttttcctctctctccctctttctagcctggggcttgaatttgcatgtctaattcatttactcaccatatttgaattggcctgaacagatgtaaatcgggaaggatgggaaaaactgcagtcatcaacaatgattaatcagctgttgcaggcagtgtcttaaggagactggtaggaggaggcatggaaaccaaaaggccgtgtgtttagaagcctaattgtcacatcaagcatcattgtccccatgcaacaaccaccaccttatacatcacttcctgttttaagcagctctaaaacatagactgaagatttatttttaatatgttgactttatttctgagcaaagcatcggtcatgtgtgtattttttcatagtcccaccttggagcatttatgtagacattgtaaataaattttgtgcaaaaaggactggaaaaatgaactgtattattgcaatttttttttgtaaaagtagcagtttggtatgagttggcatgcatacaagatttactaagtgggataagctaattatactttttgttgtggataaacaaatgcttgttgatagcctttttctatcaagaaaccaaggagctaattattaataacaatcattgcacactgagtcttagcgtttctgatggaaacagtttggattgtataataacgccaagcccagttgtagtcgtttgagtgcagtaatgaaatctgaatctaaaataaaaacaagattatttttgtcatgctgactccactgcttgaaaaatttgtttactgccccccagatttttaaagattaatacagtaaatataaaaattaattttggctccctaagccatatatgtatttgacaattttaaccgcaaagtaagttgtttaataataaccactgatttctttaagctgacttaatgaactcctaatatcagcaaatttgaggcctaaaggcactaaactaactctagactcagaattacatccaacagaattactcatctaatatcagtgaaattattcttgcacataaaggcaaacctaagtacaaagttaagtcttttactaaaggatgttacctaggatgagcagtatatgtttattaggaaattaactacatgaattgaagagaccagacttcaaaatctaatttttataaatatgctctatgttctcattggataaaactggttattaaccaattttccagaacagctgtacaagatttctgcatggcagccggctaaatggtagaaaataatatgtttaagctggaatagcttataattttatttaaataaaattgctgctataaaaagtgcttcccaaagctaaggaaaatatacaaatattttaattaaggcaaattcgttttaaaaaataagcctttcagtagtgattgctttgtaaacaaaggatgggtcggaggagagagagccttaaactcaagtctgacattcaggcccaagtcaccctataaaccggcccttagcaattctattttctattcgaaaagagaaaccagctgtgggttggctttactaggtgatgtgtgattgactgactcacctgctggagtagcaatgcattctcaccttttgctgatggggccttgtttctaaacacgtggatgcgcagagagcaaggctcagcctactgcagccatctctggcagcgcttctacccctccccagcccatagatgggattgtttaaatctcccttgttgacctagtggcaattcttcctctacctaaatagtcgatgtgagtgaaatcattctcttttgataggtggttgctagcagttaacaaccatttatttactttaacaattaataataaactttataaactgtctatttgctcctcctctccagtacatgcccgggtgagttggttattttcagcctttattcctgaggaggctcaggatgggtgggggagggaaagaaaggggaggaggtgtggtggggagagggagagaggcgagagggagagacagagagaaagagagaggcgctaggggagggaggtttacaagtgaagagtagttagggaatatggtgactctgaagaatcgagatcagcagtgtccaggaattagaaaaaataaactgctatttccgtgagttccccctctgtgagccatttaggtgagagcctcgctcttcgcagttcctttcttcccctgcctcgatgccctcccctcttaatgctattttagcttttcctcttgtaaatttcaga

SEQ ID NO: 365 - DNA, 213278 bp, Homo sapiens
  source 1..213278: mol_type = genomic DNA
agttaacatgataggacgtgggtttgacgaataaactaagcatgagatgactttattcattaaaaccaagagttgagagctctggtctctaaacttcaatgagataacttgataattgcataaaacacatcctaaacacgagccaattgccaaggaaacccttcagaatttactgagtggaaagaaaaaaaggttctttttcccacctgatgtgagagttgatttataatggggaattttcatagtttacataaaagtatttaaagtaaaaataggcaaatatttaaaatttacaaaaagacttcatgtaaaatagaatagcaaaaatgagagggaagctatctctctttcccaagtggcactgaatttctctattaagttagtttgtgtcagaagcattatttctatgtttaaacagcaacacaacacttaaactgaaatgtatttgtaaaaattctacctgactaaatataacacaaaacaatagaagtgtatttcctcgttcatttatatagaacctccataaatgctgtctgaaatggaaagatggaagagccccaaataataactatggatttcttccaagtttaagtttgcagagatgatgaataatttccttagccggttgacatcacatatctagccaaagtatatgacattattctttctaaacaaagattcaaaatttaagagttaaaaaattccaggatagtatatttatttgaaaattgaggggacatgcctcaccctttttgcacactttagcagacattgtttgtgcagtatcaataagctaatggtatagatttccaggaatgttgcataaaattttgaaaatggcattataccgtccattttgttttgttttgttttcagaaaaaagtttaagtttagttatcaaatcatcacactagcatccctgcacatggatgtgtctgaaataaaaatataccacaatataatttataaaatattaatgattaagtaatcttttaaagtcagaatttcaaactccatagaagttgtttacttatctatgaacacccatatgtaaattttcatttacatatccaacaatattgtagtaagacaggcagaggaaaaacacaggcagataaattacctttgagcacagacattatttcttatgttgtaaaattaaccctgaaaagtcctttattctggcagaggatgcccatgaaaagctttatctgaaagtatatattttttaacgtcatgcatctaaaaaggaggttgagcatgttcaaggggatctttcaacctggctcatcatgtacacatagtttcgtacctttagaagttttctgctggtggaacttataggtcaaatagacattgaaaggctatagatgattaccttaaaaattattgatgagtttaaaatatactcaactgctggggggaaaaacctacttttaacactgtatagagttggcattgtgcagtcttgtcctaaaaccattaaaaacgcaaaagcctaacaaaaaatcaaaaatgaaatatttattaccgctttttgtgacttaacacctttttttttttaacataacgtcacagtcctcatacaagtattttaatgtaaatttgacaaagcttaaaggtaacagcattttcttctagtgaggaacacgtgctgagaaaagaagaattcatggacatacaataccaattccacagcagatctgatactagcaaaaacattcttttttttttcaattgaggtaaacacatagaatatctaacatgaaacaattaatagaccgaactctgtacgaagtttgttacagtattctcttgctcctttttatcccccaagctttgagtttctgataaagtcctagttatggttcaatgaccattaataacttttttttgtgttgaggaaagctgcccaacttaagattgttttgtccacaaccaaggctcagaactcctggaagaagctcctgctctgtctttaaatcttcattggcaagctctttgaagaagagtcccccaaaaataataataagaattggcttatgaagcacgaactataaagatctgtttgaaactaaaggacacatttatggaggaacaaaggccgggcatgaaaacacattcttgaagctggagttcgagtgatgaggttcagccaaaagttcatcatgatctccagtgtggttcttttctcattggcccaacaggtttaaaatatataccacagtctctcctggatggtgaattcactgatgaaccaaaacagtcattcttttgggaacaacacacatagtgtggaaaacaaggatatatttttttttctcttctaaaactatttgaggcaacataacggcgtgatcaacagaaatgtacaagtttaacttagttcctatatttatactacagtagttataactctcggagtctttttccagaggatctttacatggacagaattgtctcagtcagcccatgatttcacatttgtgttcttgttgcattggtcctctgttgcttgatgaaaaatgacaaaagtaaaaaataatcacagctgtctggaatttcatattaagtgtcaacatctggtcaaagttcagaaagtcttaaaatagtttttgcgtgtgtttccttttcccttgagttcccttatactattgggcatgaatgtccataacctgtccgccaacattgggatctacagaatttaacattgtggggctctgtgctgacatagtcattccagggtgggtagggggtcctccgtgcatcatcatggctgggtggtggggatggcttggcaaatatgaatgcattgggggtccatgtcttaattgagtagggtgtggggtcatctggggaggagtgtaacttggctgtgccatactcattcccataggaccaccctgagaaacgtagtcccctggcatgctctgcaaacctgaaaatagagagggaaaaagaaagcgggtcaaattcctaaacatttttatactttacccatcaaagatgaaaagaaaaaaaaaaaaaaaacaacagacactgcaaatcttatacctaaatttagctgcagattcttgccaatgtttgcagacattcaaattgtagtttgcatttaatttcatcgcacagcagtataatgcaacacaacagaactaaatatttaatgcaactaaatgtcataaagtggaactgtttttcaaaatggtattcagtacatttctttgataaatgcaataagaatataaattttgagtcgagttttatcagttaactgttgatagatcatttatttttctgtgttgcatttgtagacctggacaaaaattgtagatagtagaataaaataaaattgacatcttatcatatctatatttcctcatgaaaaatttattacacaaaacattacagcatattcattttgaagaaatgagcttttacgtgtatttaaaatgaagccccctttttgaattagaggcattcctatagcagtacacccaagagattgtaaaggtcaaaggtaagaagtcaatgtgaggtcatatgacatgcccggtagtttatctctgaaaatccccccaaataatgccttgatattaggaataaaatgtaataaatgtagaaattctcaattgagatatgcaacattcaaagttatgagttaaatggtgggaagtcagcaattgtaaggattctgatttctcttacaagttacctgtttattgaattaaggttatatttactgttgcacatccccggatctaaaaggacagctttattcacctctatttaacctccagtgcatacagttgaaaagctgaacagatgtttttgacactgtaagctggtaatctaaaggcttatatgctgcagtcattttgttaagtagatccgcagtccattattaacagaagtggcaaaaccatctaaagacaataacacagcctgcatagtcccagctctctgtttattctaccacagcagcctgctcaatggatgatgataattaagtaccaaatataccatattgtgtggctgcataatcaaatcaagagaggataatattcttctgtattaagctattaatgtaattggtcatgaagcataaaatatgttatgtaattaaataggctagaaattatatggcctatattaagaactatccaagctgagcaaatgttttctctatagctgttttagggaacattgctttctacattttttgactgcattagtaaaggaaggaaggaaggaaattggcttcatcaatggtgtgccgtggtgaccccctgagctcccctataaaatgttggcctctatttacatatagagaatgatttaatcaaggtacgtgttgttatattcagcctcattaaacaaggaagtttcaatgttatatgaatttttttatgctctggtgtcttcagcaaaggatatatcttgttggcagactctgaatttttttcagatgtcaaaaacacttgaagctttaaagtctaatgggtttcttaatccaactgcagccattcagcctcagtgaaaaatccattccttcatattcagttgctcctaaatgtctttccctttaaatttattgactgactttcctgtctttctgtctcatgtcggaagtcagtaggcacatgtaaaaaataatcaaaacacaccgactccctagtgaagaatcaatggtgtcactgctgtcatatatctagactaggcataatgaactgcagcatttcatctttgcatataagataatttgggcatcaatcgtattctgacagatttatgtcactcaaaggacagttctacttttcctttttttttttatcgcttcattgaagcctgcttaatttctctcagtcaactggtgcccccaagacattatttttattcttaaatgtccaatatctgcctgatgtctgtgtttgtgcacattggggccacagtaaataggctaaaaggcagtcccacctgcttaaaacacacgcaggcttgtcagttggccttttcaaaagtgcacatcagtgtcatctgtgacttcagagatgggtgatatatatttaaaaacaggtccttagtttggaaaggcatgcagttatgggcaaggaaaaataaaatgggggcaaattataaaaaataaaataaagtctctgaagtgatagtgaagacagatcgcacccgactgtacttacttcccccttgctttgcgattgctttacatgatgaaggttacatgtagtgccattgcccatccatgcccatattcatgcccattccactcataggtcctagaaaggagataaaatccaagaagaggccggaaaatcagcaataattgatggtgaaaaaatagaaggaaactcagattccttttcacttattgccttggtttaaaaagaaaaaagaaaaaggatgtgtatggggcagagtataatggtactgtggtaaaatctttactttttcaaagaggaattttttcccccacccaatgtaaagaaagcaggcagagcaggcagcaggcaaatgttaaacccaccatgacagtgggatagtagagtggatggagaggctggtggagcaggtggcacttcccagggaagcccagaggcgggatgagccaacctacctgcaggccggatccccatgtgttgctgaccatccaacacaaagctccccatgggctgaccctctggactatatgctgctccttggctcactgaaggatcaagaagaaaacctgattgtggtcattcgaggacacagaggagaaagaagaaaagatataccaaacaatcagcaattgttcccgctgcagcactgaaacgttatagcaacaatgtggttggcactctacaaatgggggtgtggtttgtctgagtgtcttgatgactgagtgaaggtgtgtgagtagctttaaaaatgttctggaagaaagacttcactggccagtttcccagggggttcgtcctctgcagcccttgcttttttacttatctcttgattagggggacgaaggctggagaagttaggggtaccccatatacaaatattgcaatgtaccatttggttgggattctctgaggctgccatctctggtggcttaatacaaaatgttcatattttacacaaacattttaaacctgaatacaatttcacaaggttaaatagactcaattaaaagcttgcctttttattcacaccaaggaaatataaacttagtaaatataatatttccattgttttatgttcttctccctagcctccaatagtgggaacatattttggcgttattggggaaattttgccaaaggatgactaattttcacaaatcctttaaagcgaggccacaggtaaaatctccatcaagtttaacaccgttgttagtggcagcagtcatcaccccaaggaaaactgtttttccctataagccttattgcaggagaccacaaaccctcagtaaactgaggaaatgtctgtttcaaaataaaacgacttggagtataccaggagggttctgatagtaccatacaaaaactgttttagagaaattgagagaattctgagaaaagctcacatgtattttagcagcatggatgtgaagcattttatacaaaggtaatattctttaataaaaaataatggtggcaatgcagcaagtcaggctttaataggatattatgaatagccaaagcaaatgaatggatacaataagtttaacagcagatgctacagaaaggaaagcctagcatacaccaaggagctgtgggtaacagaaaaatgagagtgtgctaatgattggatgcagacaagcaaggggtaatgccagagctcacaaacacgctgcttgtggcattaatacctgtgcccaattaccaattcagaaagaaaataaaaagcagtgtcagtagagtcagggtgggaaatctccaattagcaccacttactgaagttgcttccttgagtgggattctggggacattaaaaaaaaaaatccagaatgcctggtggaagcacttatttatcagatgaggaaactactggagtataacttgatgaggatttgtgcctgtgggacataaatatagatactacttggaacttgcctgctcgatttgactggtcaatcatgggctgtactattcttcttctggcattaataaacctgaaagagaacagagaagtccagtcatcatactccgtttctgtactctgcgaacacctttgcatgaatgctgaggagcacaaaatacagtcaaatctcttctgaaaattatcttttcaatttaaaggtgattttccctttcagcgttcaaaaatagttgactgggtaatctccgtcgtcactgcgtagtcaactccaaaacaacttgctagaagagctcagggacggaataaagttctccatgagaaagcttctattaacttcaaattgtgcttctgcttcttgcacaagtaggaatctggttaaagttcacaggctggaagactttccccctttccctagactccccgtgatagggagacccagcttccccttgcagctggtcataaatggagaccaggctctagcactcggctttcacaaggtattgttaggtcagcaaagccatcaattaggctgtctgaagttttatcaccaacacagcagtaataagtgctggccagaaagacttctgctcttcggcaactcctgcagtttaagcctgtaaagttaggggtcattcagaggtcagtgccagctgggggcagcctttccagcctaagctgggacacccagggcagaggataaggtaactgccaaccataaacccagccacctttcaacccactagaaagacagagcctcaggtacacatgtttgatattagagctcaagaaacgtttgcaaatcaggtggtggctgaatcgcaggaatgcaaaggagaagcagttatttcatctaagaagcctggatctaattttgttggaaatccaaaaataagtgcctacttcatgttactttaatgtttaataatgcccatcaaatattcatgtacaaacagagtaagatgataagaaatctcctttatttctccaaatttaataaaaacaaaacaattttctaccatttgtgagttacccttgtccctgtgcacttaacgacgtgtattccccacacatttgagctcatgcacacgattcactgaccacgcatttcggaggagcagggagcatccagctagcttctccctaaaaatatacccattgataacatctgtcaatatttccagtttcagatcttaagcacagggggacttcatgattaatgagtccacctggggccacaggcaggaactgaaaactcactctttgaaattagccagaaaaattcagtgtgtgctggcagctctgtgttccgaggaagctgaagtccctttggaggaggacagtcaggccccactcggtcgggcctcctgtgagcactctggtgggaatacaattaagctgaggaataatagctgggagaaaaccaaaggagtcttttgcatatggtgtttgtttgcaaaacaatggacttctttattacttaagaaagtgtagctcagttgtcaaaaaagaaagtgatcagctatgtagaggtgaaaacaaaaggagagttgaaactgcatctttcttcccacctgtcacctgaaatgttgctgaggaatgaatatctgactagatcacaaagacttccagaagcatccctcctccaatcagaaaaagaacttaattatctactctttccccaccacttttacagcaaccaaggaggactgacctgatatttccaccccaggaaccgtttttatcagctcaccttgaaaccagcagagatgctcaggagggtcagagaaggctcttctccttgaagtttctaatagaggacaacactcggcaggggttttacccccttttatgtgctactaatcctggtttttgtgttttgcgttttttatttttatttttttttcggtataggctaactcttcgggtaaaacgaattgctatttttttccctttttaatttcactcttttattctttacatctggaggttgttcccttatttatgtctttctctccagttcccccaaacactcccttactcacagagctgcaaggcatcatggttcttagttctcagcaggagaactccacactgtcttcaaacaaatacttacggggaaggttagaggttcactcaaaggtcatttctttggatactagtcagaatgtttacattagtaaaaacgaggtccgctcaaaaggttgttcaatgggggacacacaacaatgcagaacattaaaaaagcattctgtgagctagcaggtctttatagaagcactgaacttggaaatgccactccagtataacattttcaactagttaccatggcatggactggatgttcactagcagttatggcaatggcctttctttacccacttctcctaagcaaatatgaatagaagcctctgaaggttttcactaggtccttttaaaaagggtcacagagattttgcttttttcacttgggcaccatttagcctctctggatttttgttctcaaacaatgtttttgatccatagtgctatttcttgacagattcataattctaccacattctttcaaatcacacagaattttaaaaacatatgggccccaaattttcagaaatctcttaacatgcaactcctgccaattgtcaattcccctgatcttgggatattttattgacatcatagatattactatgaaaattaacaattaatgagctgactgtaagaaaaccctgacattaaaaaatgaaattaccgcctcctaccagtactgatgactcagaggccactcttagaaaatacactgacatacataacatggagccatttaaattatagactaaaacaaatcaaactagaaataatttttatttatttaatatttgtaagatgaaatttccatatatggtcttttctcaaaattacatgaaataaatttttttccacatcttctaatctatattttttagaatgacctttttcaatgctcaagtagtaaatagaatatcaagctttgattttacgtaaaatttgaagaagctaagttgaaaatcaactcatcttcagtctttcaaggttcaggctccattcatatggaaaaatgtaacttgctggttcaaagacaaaagacttgtcttaaaaagactcaaaaggttccatggatattaaatgggccttataaaataacattttgatgagttaagtgtaaatgaatcagacacatatggattaagttatccttgaatttcacacgggtttaaaaaataaggggaaaagagggtcttggcaaaaaacattttggactttgccaaacccaaaacatttgaaaaattgctgaagacatccaactaaccaaaatgcagcaagctgcacccaactttaatgaaaacccccacaagttatttccaatccaaagactgttagatttttcatctgtatctgatattaaaaaattctctaagttttaatgtcataccagaatgatttcgaagttgcaggcatataatctacttttctatcggtttaaacaatttaagttacaaagtcttcttcaatattaaacagttcttaaaaaacattctgagtttttttacaacttgtccataaaatgtaccagtaagcttagtgtctagctctatctagatttcacttagaaaaaaaattttcattagcctcattgtgactttttttaaagggctacacataatttcattagtgagtccttagggaatgaataccctaaagagccctagttccattgatttgtattgaacacaaagttagtatccaggcccatacaaaagcttgggagagtatctactaagactatctactttttctctaaattttacttaagtagaaaatgcatgagtatgtgtgatccttaaaaattatatactaagactgttagtttaaaaataacttaattatagaaataaattcaatgatgttccaagaatcacgaggcctttctgactcaactcagagatgaaaaaatacattaaaacaaataaacccaaggtagcaaatatcactgtaatctcatcttactgccttgctgaagagctatttcccagagacctctcctgtcctcagaaagtctaaacttggtagctttgcatacttttctacaactgaactctgaccatcatgatttttctttaaagactttttactccgaagtatggttcagattgatagaagtagatttaggtgtcattcctgtttgttgttggtttcttttctttattcctttctttctccaccccccaatctttttaaatggcggataaatcccttctttctggttcactaacttcatgccacacctggtaaccaactccttttggaggcattccttttgttagaaagtgcaggcctccatggagttacctggaaagctgccatccctgaacactctgaggaggaatcaagaatagctggaattgaagattctgcatggattgctttgcgcagggaaggggactgaaccgttgaagagagatcagatcaactggggaaaggcgtaggtagctcagtgaccggggacctgttaaaacatgaaaaggccctgcttccctactgtccccagccctgggacccatcagccacagtgcttattcacagcacttgctcctggctggtgtttcaaatgatgaaacttcagccttggcaagtcacttatcaaatttctccatgttttcttactttacaaaaaaagcaagtatttctctgtgctatggttacagctgagagtaggattttctcagtaagatacattaaaatggttaaatcagtgaataaggcaagcttaatgcctttgaagatgaacttgggcacgcaaatgatggagtcatgtcgcagacataagttttccactggtgaccagacaatggctcctttctcacagacaaccgtgagcaaagtaaggtaaatgaatgagattcatatgttacttagggacagactcatggatcataatgaatttccctaagcaatagtttgatttataatttgatagaatactagatttgcctacacctttaaaaacacatgaactaaatactaataaatttataatataaaaacatgatgttaatctggaatcacaacattttgtacctttatgaatatggcttgaataatggagtgttcatgctgacataaaaggccctggacaaaattatcaagtaagtgatggccttctactgtcttctttcaatattcttactttcatctaattcttccctaaagttacaagggctcctggaggttctttactaaaatactctactttgagcatgcccttctccattattgttgtatactccagacttatgcatagagcaatacggtgaagagcatgggctcatgtcctctgccctttatttgctgtgtgaatttggacagttcttcttaaccttcccaagcttcactctgtttcctatctgtaaactgaggaaataactgggcctgggtggttttgaggattgagggagattttgtatgcaagatccttagcacaatgcctggcacatagcaagctcattaaatgttagcttacagtcaaaatgcacctatccaatgctcctaaatagctctgttctctcatagatagtaattaggaataggtgggtggctgttaaacaaatctatgctggattggccacagggtaataactgtgttgtactcctacaggtagcgtgtgttcatatcgccggatctttctaaaaatcggagtttaatccaaatgtacaatgctatggtggagattttagacactggggcaggcatctgcctgcaggggtgggaggtggataggggagtgagctcttttggaatcacactctctgtatggttctctagatccttgctactttacatgtgtgccatggaccagtagcaacatcaccttgagcttgttagagatgcagaaatacattaccgtccccattcctgtgctactgaatctgattctgcattttaaaagatctccaagggatttatgtacatttaagtatgagaagccttgctctagatcacatatcaaattctagtgctctgcttaagaatagaaacttgcaaagatcaagttttaattgtgaatctcagctgcaaaaaaatgcacatactcttctctttaggtatcttagatctaaacagccttttactcacttgccttgggcaataaacactttataataatttaatttattgtactccatctgtacctcttaaaggaaaagctgggccagtaaaatgtttttgtgaagactgttaacagaggctatctctcaggcatggataggagaatggtagatttctatctttttttccaaataattctgtactgttggagtttttaataaatataattatttttatacataaaagaatttttaaaggagatcaagaaaatttgttatcttatttgactaaggtttatatgggtaactgtagggaccttttaattaaaatatttgagaaatttcccctcagatagggaattatcttttatttcctttacaatattgagcaacagtaaacactattccatgaatacaatcacacttgatggcatgtaacaaaacatcccagcaggttacgattttgaagcactgttactcttacagaatgccatcagattattcatatgtagctatttatcatgcactataaaagtgatctttcaaagctatttgaaagcaagggaggagaaaacactcaaacttccttagctattcacatctaggatctatcctcttaaagataaaatcctaagtcaatagacataagttgtagtatattacctcatcctgtacatgatttattgcagatggaagtcaactagaaactgaattactttgaaacttttactactgacattaaaattccagatctggatacctacacaccttacagtgcttctgaaaataactttttgcagacacagaaggtacacctacaagtttatttaactctatcaacataaaaagcaggcacaatcattttcaaaactactgatttctaattacctattctgtatctgagcactgtagcctgacctggctttgcaaatcaaccagtcacttcacaatcagttgcacacattcttagccaactcccattatgttcctagccattttactgtaagaggaaaagatcccaacaaatctagtagctttttagctttcatgatcacctttgattgaagtattaattctctatcctacttcttaatggaaaccacctaagcattaactggccaaaaatgcaccaagctgtttagcaattatgtattagatatgtttgaagagatcaaggtgcactcacatgccctgtgctatggatatgtctctgattagcttgtcatctgctcagaagaagatgtaggctgattctcccatacagtctagcaggccagctgttagctgcctgtcaagccctcaagtggacaagtagtccaggagcaaaaatgtcactcctttgatctggcaaggagcagctgctgatttatagagtaggactttgttcttccgttctattttactttctttcctaaggcagaaccacaaaatccaggagaaaaaaaaagtgccgttcccagcaacatcaacaagctctgacaactgcaacagggtttttcttggccctaacaaagctctcaggcatctcctttgacgctcacctttccccctccccttcctcccacccccaccattttttgcaatgcagtagttattgtttaattcagcttctgtaaatggaatggactgtggccagcaagcctggggcataaacacacctgtatgaaagaagccttattgtagcaaccatctacaaggaagctcgcatgaaccacacgctcctgagttcagaaagaatgctccattttttctgacagcaaattttaccctaagtgagtttctatttttggtgccaccaacctatgatgaccacatttgaactgcttcctttccaatggcattacactctttgaatcaaagagataaaaggattacattttcttctttttttttttttatctgtgagcaaacagatccatcaaaaatgtttatccactgcctgtaatatcaatcattgagagctgggtaaacgtccagaaaggctttagcaaatgcattatcaaagatgctataatgttgatttcattaccactgatttatattgacatgactttccccgagtaacttacgaaggagaaaaaaaccaacaacaaaatctacataagacatgtgcattgtcttgctaagaattaaactggtttcaaatgcataatcctgttctcaacagataaatctgtcaggctagagatgccctatcaaccaagtgggacatgcaataatgctttgagatacactgtgagaagtcatcagccacatgtatgtaggtatatgtatgtgtattgtgtgtgtgtgtgtgcacatgtacatgcatggaaacacacacacacagagcaataaactttgccagagatgaattcattaacacctggctcagttttctgtgctgctgctgaagtaggggtgataaggacacgcacagacacatatacacacatacatacagacagagttaccaattctaggatatttagacatattactgcatagatcaaagacaggaattttgtcggggggtggggaggggtggaaatgccagaaacaaaggagaaaagaatggttgctaaacattctcacttctattatactcaatcatgccatgttctagtgtttgctcccttcccctctatctaggggaacagagatttttctcaccctcatttcttgctttaacctacatcaccctttggccagtcaaaagttactaatcacctacctcctccacgttcacagaattgtattcatagatgctttctctaggggcatgtgtgtgtgtttcccaatgagagactgggtttggcatgggaagagggcggaaggtaaagctaggtataaaggagcagatataatgtaaggcttattttcatcctgttttaatcctaaaaaaaattagaccaaataatttttaaggtccatagtaatctatctatgtgtcacacattggtaaatcttccatattctatacttcacataagacaaatttaatgacagaatataagacaaagttatatataaaattatcaatacatacatatatagttatatgagtttctttctccatatatatgaaaatgcaagttatgcctttaaagatttttattttccacacccacagaaacaaactgaaaatcacaattggagaacacacaaataattacaagtcaaaatagtccatagtcagtaaataagtgtcatgaagtcaattaaagaagttaaagataaagattaatttcaaattcttggaggaagaaagctgaagcagattaaaagaacgtggaatgttggaagaagagaaaacaaggaaatggcatgctgtaaagcaccagtccagaccggggccgatgttgtgcaagggaggataaaggaattgaactctgactggctcccagcttcgatctggaaaacatggctatgattaacacgcaatctggtagaggttcttgagtgataaattgaattcttgaaattcctaaatggtagaatgataaaatatggtgtttgaggaagatctttccaagagctatgtataggatgaactgaactgatgagaatctagaagctgagaagatggaaagttcttgtccaatccaggcagaagagggaaacaaaacgagctctgattaaggtggtagaaatgaaaaagaagtagggtatttggttgggagaactgctgataaattaaacttagatgaaaaaggagagatacaaatacaaaagatattaagaggataagtctgagaatttatgtttagtatgttacggtgtatagttgatgaaaattggaaatagatgagaaattcctatttgttgtggtgggaagaggcaaactcaatttttcaaatgttacctttggtttgacaataggactttcaggctgacaaagtatgtcagccactcaagaaaaaaaaaaaaaaaaaaaacaaggacaaaagaagagcaaaaggtagggacttaacttcaaaacgtctaatttcttcctattttccaagctacatgaatattccagagctgcaggagtaggtaacaggataaactgcctgctggctacctccaaaaaaattacttccttcctcttccaaattatcctgtaaattttgggaagttctttatctgaccatgactggccaagtcgattgttagtaaaaacctctgtggtcaaggccttgtttctaataggaccaattcgctttttctttacattttgagttaatttgtgcaactagatttagaggccaatgataattacatacatgttacactgggtgttgctacacaaattacgttccactccttacttaacgaaagtaagtttagtaatggaacttatcagagagtttttaaaactggaataggaaaatctatataaaagactatgtatttttaagcaatagcataaaacaatcaagggtgggttttctccaggtagtgacaactaatttagaagagaattgataggacaaagtgttacatttaaaagggcctccattaagtgtgatggcttccaaattgtgtcctcctttcaaaccatatttttctttttaaatgggcttttaaggtgaaaaatatagcacttcacccaaaatggtgtggaaacaaatggttctcaagtctctattcttcaactcaggccaaaccaccccaacacaccggcaatctaaagccacttggagggaaggtgctgtgcatgtgaatgtccccgtgggcctttcatttgtctggggatctcttttttctaaagcagcaggggatacttcagaagaccagattggcatgccagaagtgtttggatggaccaggctcttatcctcctctcaattctcctgctgctttaaaagaaaggatgtggcagaggacacatttggaaggtggcaacattcttagggccctttatcaataccaccgctttctttaaattgtagcttggtctcttgtttgagaggctgagattttagcacttttaaagggaaccataagtgagaaatctcctaggtgttaaactttagagtggcttcaacccaaaatatgaaaaaatgagattaaaacacagaaagtcaagtaatattaagaaaaagatccaacaaacaaaatatcataaatatgcatacgtatattctttctgtttaaaccaaatgctatttaaccagtttatactggcatctagtaaaggtgccaatggggaaaaaaaaatcaaagatctaaacaattttaaaactcactttaaataaattatagttctaacagctacgcatctaacaatagctttaaaaattattatgaaaacatattatattatgtcagaaagcaaaaaaaaaatctattcatgaatacatgacttaatatcctcacatttatgatgttcacatatcaaagaccaaattccaaataaaatttcctgactgccttttcttaatgacaaattaaacatcttttactttgatttgacagccgggtggcattctgtatcttctccagagatgttatacgcagtctttccaatgtgacggtattattacccccaaaattttcggcatcatcccgtaatcataaaagacataaaatatatctttataaaccacaagagacctagcaaaccagcagttatgccacatctgctttagtccttaaatattttagctttagagggttagttagtggattttccccccgatttgtgagaaatagagacatcaacctttgattctgacattacccacaaagccgtcatctacaacagacaaaaaagcaaacacactgtacggcaatttgaaagaatttttacagcatattcagatttcacatctcctatcagaatttcctaaggtggtttaacttaatttttagaaatagaaatgatggcatttctattttctatttccactttcacaatgcagataaagtagcaacactatcaaaaaataacttggctgggcacggaggctcacacctgtaatcccagcactttgggagaccgaggcgggcggatcaccagcctgaccaacgtggagaaaccccgtctctactaaaaatacaaaaaagtattagccgggcatggtggtggatgcctgcaatcccagctactcgggaggctgaggcaggagaatcgcttgaacctgggaggcggaggttgtggtgagccgagatggcgccattgcactccagcctgggcaacaagagtgaaactccatctcaaaataataataataataataacaaaacaacaacaacaacaaaaccttaatttagtacttggtttaactgccacagattctttagagtcaggtaacgtacaaataaacaaaaagcaattaatacttttaaagttaatgtgctaactaaccaggacaacactattcctttggcctgggctgggctttctgctatggccatctggctaacacacccttcaaagtgcttatcacagaaatctctttgaggcaacttccctggttccaaagtctgattaagaagcacttcctcagtggcaccgagctaatatgcccaacacagtacttattcacaattgtgatttactcgtctgactttcctactagatagccttagagagcaggggccacatcttaagttttattattgacactgcgtcaggaatatagtacaccctcaataaaatgtttgtgagtgaataactaaatgagtgaatgaaaatagggttccttcatctcggatataacttagaattgagaataaaagagccctgagtttaaggattttcttgttctcattttataagaggcacagctgaatccttgatgaaatgatttgccctggagcgggacagaactaaggtgggaaataactcaggctttctggcactggtctaattatttttgtactcacaaacaactcaagatacagactagaggtattagttaaaggtgcgaatctatctgggcattagagaggccaggtaaatcgtgggtgcagatgtgacttggaagaaattgggcctctggcttttctaggctggcaggcaatatgcacagtccgggacataactgtactggggatgatggggcagttgactcaagtggagaggaatgagaactgagatcaatgaggtgttatgagtgtgtgtgtgggggtgggggtggggggtgttaggagagagggatagagaatagaaagcgaaggaggaagatttgtgagactcagaaaggaaaggagacaaaggagaaatagaggcactttgagaggccaaggcaggaggattgcttgagccgcgcagtttgaggccagcctgggcaacatgatgaagccccatctctacgaaaaccttaagaaattagtcaggcatggtggcttgtatctgtgtggtcccagctactcaggaggctgatgtgggaggatcgcctgagaccaggaggtggaggctgcagtgagccgagatggtgccactccactccagtctgggcaacagagccagaacttgtctcaacccccaaaacaaaaagctttttaaaaatatttttttctgatatctttgtaagcacattttgctcccaaatgtgctctgaggaactctagtcaataggtatttccccagaataggggcctaggtcaaaaaaatatggagaaaacaaatgtgaaggtaatcaaagtgaagtcactttctctgctgcagattgtgtcacagcctttaatagagtgatatatattacagatctccaagagaaggtgatggtacaaattaattcctgactctagttgttcagattttgaggggcactcgggttccaaggatgtgaaaagaaaatgaagcggcatcctaatttttaacataaattatatttttaagccttttatcaacttaaaaataggctttctttccatctttagatttccccaagtcagattcagagatgaagaaccacttgtagggctcttgtttatatctaacctgttcataagtaccccatgactaccccaaatatgacaccttgacccctaaaatgtgctgtggctgaaaaggttctttagaacttttctatctcttgctgggcgcagtggctcacgcctgtaatcccagcactttgggaggcctaggcgggcggatcacgaggtcaggagttcaagcccagcctggccaacatagtgaaaccctgtctctactaaaaatacaaaaaattagccaggcatggtggcggcgcctgtactcccggctattcgagaggctgaggcaggagaatggcttgagcccgggaggcggaggttgcagtgagctgagatcgcgccactgcactccagcctgggtgacagagcgcgactctgtctcaaaaaaaaaaaaaaaaaaagaacttttctatctcaaaggtaatttgattattagggaattatattaggcttaaatgttttctctaccttttcctttccttacttttctcatatttttcctactcaatgaaatatttttaaaaaaaagatcattgggtattttactatgcctaaaatgtctgcttcaaaatagctgtttgaaaccgaagaataatcttaagaataacgtgtgtgtgtgtgtgtgtgtatgtatatatacatatatatgcatacatatcacatatatacatatatattttcaataccttctggatgtttcattaatcagaactgtgactgagctgtgtgtggccatctaactttagcatgtctgttacatgtgttggagacacatgcatgtagaaggtaggaggaggtagggacaatgttaagaggaaggagaaatgagaagaggaaagagacaggaaaagaggaagtgctgctttggataatgtatagcaatgtacatcaaacactcccaatcaattctactttcttgtttacagagcttacaagtacaaaatcagcttttacttataactgtgttaaacaccacctgcctgccctctgaacctcgctgtcccgagatgaggtcagcccggcgaagggctctggttctataagcaatcctgtcattcaggctaacagcagtgattcactcacaggaggcaaaaatgactcaattgttgggcttattgactccagggagcacagctactctattattaccatggagtgcaaacaccctgagctctgttttggtccacttaaaattactatttgctgtgaagaattggcaaagcaattcttaaaatgatgggggtgaaagtcaggcaagcgccattatgggcttttccttctgtttaagcagaagtaagcagtacaggactcgttctgagcctgacccacttatttaaccttttattcactttgttgtattaacatatattaactggctatataagccctaggggggataaaaaaacctcatgaccaaattatggttccattttcatgggtaacctctccttgggtggaaattaaaccccaatataaatacattttaggtgcacacaaaagtgaggaggaatgccaaaaacaaatgctggacaacagtcctgcaaagaccacagcaaccatggagtggctgggtaaattacacacaagaggaactatttgaaaaaccaaatacatttaattaaataagttacaaaattattttcctatctcttatctactccccttggttaatatccatgacatactgatgttgcataattgctcttatggaatgctgcagcttagagccgtaatgagctgcctttgcacaaaggcagcaaaagtggtttccctacagagttatcttctcaattatttatacttgcaacactttcacataatggcagttttaaaatcaaacaaacaaagcaaactgtacaataaaggaaggaggcaagaaggtgcagggaccttttcctttcttttttgaacaccagaagggatgggcaagccacataaagtcaatgaatttggttcctggaaaagtctcaggggccttgcaatgaggcgacatcaaagcatttggagattgccaccttggtgagagattaaacatgctctgcatacctgctttgcttttaatctgtcatatctaaatatatgaaggaatgcaaactttatttcttctgtttgtaagtttgtctttgaaaattcctaatcagaagacttgctactcaccccccactcctgaaaaaaaaaaaaaaaagaaaaaaaaggtgctaaactgtcaaagtgatgtcagtgtaaacagaaaatggtgctgtgtgttgtacccgtccctcaggctgtggaagggcttgaaggtttttaatagtgcttgtttccactgtccgcacctgcctttggttaatcactcaaaaacttatatacagcagaagaaaaactccttggcagttataccatatatggacatacaaaataacacaaagggtatatttaaattctaaggcagaactatactgttgtttctaatatttaaatttggtatacatttggaatgagctgcttactgctaccatccaactcagacttactcggttcttagcgcctagctcagtctcctgtttagagtggatgctcaataaatgttagctatgtgatgttttcaagttaatccatagatgtggttgcagattatatttttatattttaaaaaattaaaagtgaaatttggacacacattttggacctgcataacattgatacttagtttgattctccattaaacaagcatagattttggcctttaggaaacagttaacagcctctacttaaacaggtattccacttcaattaatagccactcatatatctgtgacttaagacattcattagcaataccaatgaaacaaagcttttacatcacctactggccgtttccaaataacagaatgttaaagcaactatttccttaaagtcctatgggaaagattatagaacagagtaaaaaaaataattttaaaaacctcaaaacttatttcttacaatatgcctacatgcacatacattgaatttacacacatatgcacctatttttcacaaatgtgtcttgtgaccttaaatcccacttgacttcacacactcagggggagaaaaaaaaaagcttaaggagatttttttcctcctaagcacacaggtcagaaggaaaaaaatacaccctggggaaaagaactcagaccatgatacacaacccagctgaggtcatggaagagaagctcttggaactgagctgggatccgccatcttgttttgctttgccccaagaatcaaactaaactgatatcatattgtgtccacttgctgccacttaaagttgttcttcctatgaagagctaggaatgagccatagtttcttggccacttcctttcttcctgccatcctcacctccaaggtcaaagcgattggtggtatggtgggatctgaggggttggcaaccttgcagctgtggccccaattctacttatcaatataaatttacaccccactgttggtctctgagcagcactagccaccaacagtactgaaaatgatctttctgaggatgtacatgtgtggttatgaactggacaaaggaagatggagaagcgtaagaatccaaggagaacacagatgataataagaaaactcttgtgccagagtattcaagacacatctctgctgtaggcaaatataaatcggactgaactttggcatactgcaaatatgtcccatgacatgcataatatacttttcaaaaatgttaatgcaacaactggtatgtgattaattgctacgtgaaagattaaatactgaggtctagaagagagttgggtagtttttgcattttcaaatatggacaggttctgaagggaggtctcagtttctgagtttcccatttgaaaagtgctccctctggcagtaaaaactgatgtgaaggttagtagaggatgggggaaagtgacttgattctgagaggcctggagaataaaaccaaaagctgaagtggagccgagagggtgtggctttcatccctgggagggctctggctgatgggaatagaaattgctatcagtggcttgagggtagtaagattatatggccctcaattcccaaacgtgacagagtcataagaaaccttaacctctattttttttttccaactttcctcaaccgcagcaacacactctttcgcagaaggctagccaattaaccaagcattaaaaaaccccacaaatctataccaatagctttgcaggacaaaaagaaagacgtgtgaagtcaacacgtgttgttataaacaacgtgagccaggatgttcaggagccaaataaattgaaataggctatgactgaaataaacaaacaaacaaataatcagaagaaatgaaatctctctctcctttcctcaagtatcctgtgtatgttcttttgcattttaattctcagcaacaggccttcagcttctccgtgactggtgcaaatctgataaggggttggcacaaatatactgagcctagtttacaatttgttttgcaacttcccttcccagataaacatagtccaagtacaacttctgggaaaaaaaaaaaaaaaagttgtgtttacttgtcctgttattaagatttttatttttttctcctgaatgttccctcaggatgctggcttgaaacctagaaaaagcttggatttcagtttcagtctccaaggtattctactgttcagctgggctgtgtgctaggagggaagctctctaccttgctgatttaattaacaggattcttttcattattatggggatttagtttcttcttgcctttcagtgtttgggaaacactgatttatgttttatattttgaaggaaaatttattgttctttgacagctgaggctctgtaaatccctggcaccaaaaggaccccagggaggtgtcacagttgccttgccctgcccacctatatgctgtcatctcaagggccccctccagaagtaaggagaatcgtcagctgctcagtgcccaacccactcctcctcccactgatcattatgccagcaggggttggcccattcccatttatgaatggtggtatcacggattcatttaagtgaagcaaacagtccatgaatctgacctggatttagtctcttgactaaatagggctcattgagtcaagtggaagtatgtgctgtacttactatgataaccatggctgaaccaaaattcagggcaaatgttgtaaagatgaggatgcttaggaggacagcaaaacaaaatatttaaagttagcactatagaaaatctggcatagatggttgtcaagctctattgggttatcagtcttctaaactacacagtccatcaaattctgacttggagaaaaagtgaaacatgtagtgaaaactctggtagctaatgtatattttaggtgaaaaatttcaggtgtcagttaatgctcataattttattacattaaagaagtttccttttcttcttcttcttttttttttgtggtaagagacagggtctcaggctgggcgcagtggctcacgcctgtaatcctcgcacttcggaaggcaaaggtgtgtggatcacgaggtcaggagattgagaccatcctggctaaaacggtgaaaccctgtctctactaaaaatacaaaaaattagctgggcgtggtggcgggcgcctgcagtcccaactacgcaggaggctgaggcaagagaatggtgtgaacccggtaggcagagcttgcagtgagctgagaccgcaccgctgcactccagcctgggtgatggagcgagactccatctcaattaaaaaaaaaaaaaaaaaaagagacagggtctcacttttttgcccaggctgaagtgcagtggtgtgatcatagctcactgtatcctcaaacttctgggctcaagcaatcctcctgtctcagcctcccaagtacctagaactacaggtgtgcaccaccacacctggctactttttaaatttttttgtagagatggtagcttgctatgttgcccaggctgatctcaaactcctggcctcaagcaatcctcccacttcagcctctcaaactgttgagattataggtgtaagccactgcgcacagccaacaaaatttccttttttaagggggcttcataattcataacttgctttcatccatattattataattaacatttattgagctagacactaaactgaatgcatacatgtatcctcttatgaaattctcacaaaaaccctatggagtggataacattatcggcatccccattttctggttggggaaactgagagttagcaaaatctgataatatgcctaaattcaccagttagtaagtggcagaagtggcagtcagatacactcatgcacacatatgcgcacacacacatacacgcatgcgtgcaaatgattgggggctaggaaattaggaatatttagggttgtttttcctgtcttgtcaggagaggcctgcagctgaaagaccttctgggaaccaacagcaaccggatcacaagctatcttaaacccaacagactctttatccgctatttcccagtcagatagagaaattgaaccaattattagagcagacacataaaatggagccttggaaattacttcatctctagaaaagttatagaccagaacttttcacttatctaaatttgaaagccagtaggttctaaggaagaatatagaaaaacatagaatgtgcatggaattctgtagtggttggcattttaaagtcttcaaaattaagagaaattagtgtgggaatgtggtccagctggtgaggaaaaaaataaacgaaagtaagcctttactctgaacctgattcaacaggcccatgctaattttctcattcatcagttctaagggttatacatgaatagtgcttttgaaatttgaattatctttgtttattcagcctgtccatcaggatccttaaatgcagactgtaactgtcctaaaaattccgacttcttgaattgtcctacaaaggaaatcctaaacagatttttatctccaatcatactctagggaaacacctgggtaaaatgtcacctaagggcactaactcatcattgtactgaacacaacctaaaagagtttcagggtcaatgacagagggaagcaagagaacacttgaagcaaattaacacaatggtgagaagtccataccagagacatgagtaggaattctttacacacagagagaatttcaaaatggtagcctcgctttgcttatctcatctctatttcacctaaaagaaaattttccattatcttccttcaaatggtcttctggttcccctggttcatctcctttctcttattaataatctttgattgcctgcagaaattctagaagtcacaattcttgatcccctttaacaaatatttattcagtgtctgctgcctactgggcattgcatcaaggaccttatcaggaagtaaatagagaagagactgtataacaagccacatttgtcaaataaaaaaagcactaagattgggattaatttcacatcttagggatctctgaatttaattaaagaaacaagacatacagccctctatccattaagttttgtgtgatgaaagaggcagcacaatttaatgaagactatgcgatttggaaatctgggtttgaactctggctatatctcttactgagtgattttggacaagttctttaacttttctgtggcttaatctcctcaaatgtaaaatgagaataaattatatagtctacttcaaagacttaacctgaagatgcaatgtgaagtccaatttgtattgtaaagacatcagaacagtaggtgagaattacaaggaaacatatttaaaaaattctacaaataaatgttaatgcttacaatcctgtagacactgcaaggcatacatggatgaagaagatttagtcttgctctcagaaaggttggagtttagcggtaaagcaataaccatgcaataagatgaaagagtctcaatgccagaagagtggccatgggtgtgcagaaaaggtggagataacctggatgagagcgggaggaggagaggaagctttgggcccttccttgaaggattctgacaggagggaatgggaaggacagaaggagagagaacataccagatagagaaaactacttaagtaaatgcacagatagagcaagtactcctagtcataagcttagtagaaaaggtaccggactgaagttaggtggtaagtttgaattctgctggtgcaatttctcagctacatgacctctctgactcaccatttctcatctgtaaaatggagatgatacctacctcgtaattgtaaagattaaagattttaggccaggcacattggctcatgcctgtaattccaccactttgggaggcctagaggcaggaggattgcttgagtttaggagtttgagtcccagctactctgcagactgaggtgggaaaaatcacgtgatcctaggagtttgaggctgcagtgagctatgaccatgccactgtagtccagccaaggtaacagagggagactctgtctccaaaaataaataaataaataaagatttatccaaataatgggcatatttggataaatttttggacaaatacttgtacaaatattatcaatgttttatgtacttaagaaattttggagggacaggcacggtgggtcacacctgtaaccccagcactttgggagaccaagttgggtggatcacctgaggtcaggagtttgagaccagcctgaccaacatggagaaaccctgtctctaccaaaaatacaaaattagctgggcgtggtggcacatgcctgtaatcccagctactcaggaggctgaggcaggagaatctgttgaacccgggaggcagaagttgtgggagtcgagattgcgccactgcactctagcctgggcaacaagagtgaaactccgtctcaaaaaaaaaaaaaaaaattggaaacagtaatttaaaaaatcctcaatattaccaaaagaattctgattagtggctagtttatgtgtacagtggtccagtcatagcactaatttctataatcacctaaacattggaggatgaacattaaaatttgtgttattgacttgcacttggtattttatctacaatgacccattattagaatgtagatgaaatagagcaagtaataagtgagatagcctgaattttaagctatcttgctagattttgtctttcagagtatcattttctccttccactgacatggatgagcataaacacaataggtggatctttatttagagctcacaaattattcgtccaaatatttaggcacgtaagaacaacatacccttctagttattgttccttgaagtcaaggatgaaggaagttaaactacatagtcattggagcatggatactgatgctggaataagaaaaacaagaagaaatggaggctggagattaaagtcccagcaacacttagcaacctatactgcttttatttatttatttatttatttatttatttatttatttatttttattttgacagagtttcactcttgttgcccaggctggagtacaatggctcaatcttggctcaccgcaacctccacctcccgggttcaagcgattctcctgcctcagtctccctagtagctgggattacaggcatgcgccaccacgcccggctagttttgtatttttagtagacagggtttctccacattggtcaggttggtctcgaactcccgacctcaggtgatccacccgcctcggcctcccaaagtgctgggattacaggcgtgagccacggcgcccggtctatactgatcttcaggtaccacctttttctttttataaaagaattcttagagatcttagaaggctaaaggggagaatgatgcagaacctgtttcactgataaataaaaacaggtctgctaaaaatcctttaagttgagcccacatgggatgatgacttacggatcacaaatgtgggaaaatggacctccatgcttcctttggcagataacaatctcttatttctcattttcaccaaatgaagacagtaggaatacagtcttgacttagtgtatgagaactatactctctgaatcacctgtgttctgaggataaaacaataaaaagttataaagtaatcaagtccttaaatttaaaaagaaaaactactatggaagtcatgtggaatctgttgttctacatcctttacctagactggaactgaccagtctgacaaatatgggtggaagctgaaatttaaccagcgctcacggccgggaggtaacagatcttgttttctattggtaaaagcacaccccaaaggtttcagaagggccaggaaaaaacaaaaacaaaaacaaaaacaaaaaaaaacctctgttgttcatttttaacctcgaagagccaaataaatctagtaaattctccatttgttaatcaaacatggcatataaagctttctaggatgcagcccctgtagaataaagctgccaaaccaccttggataaatttttaatgagatgtttgccttgatgataggtatcaccaagaaaaggtatcttgtgatgcctgtgaaatatgtaggattgaccagaggcagcccatgtgaccctgaggattacatcaatcacaggaccaaaagaagcagcatggaaaagaaaatgcgaaatgatcagttccaatagaacatgaagcataaacatacattctgttcaagggacagccacccagcttgtgttagaagtcattaactatactcagactcagttttcctgataccgtatgctatttcatgtggtttgaaataatttcaaggaagtgatcttcctagcattttcaaggaaaaacaccaaagcgcttagtagtctctgattttaactttgggagttgaaggttgctttctgcctcactgtcggtctgtcttctcctgatccaaagtgggaaagaatttggttcacccaaagtgtgcccccaccttttgtgttgttcccagagcttgtgtttcagcaccacttagcataactccatacttaaaacacagtgtggagcctgatacgctagtgacctcttggcattgttgaaaaaaaaaaaaatgaaatgtgagtggtcctgtcaagatgactacatttagatagtcggcactaaaacaacaagaaacaaagactcaagtgctggttggaaggctcgaggaagagcagctataaagagaaaccaaaggaagccaaatgatgatttaaacatcgacttagtttgcccttacgtacgagggcttccgtgtgggaaatctcaccctccaaggtcagacatgatgagatattcccagagtatccaaggacttccatgttcactgatgtggactgatatggaaatgaatatgcttaaataacattttggcttagggatatcatttttgtctggcaagtttgccttcccaatcttaaaaaattaaactgagctctttccacaggataacgcagcacatagaaaagaactggaaggagtagaagggagagcattggtctgttagaacctaaaggtttagttccagtctgaccccgaggagctttgcaacagtgaacaagccctcaagcctggaagagtctgtgattcttcatttgtaaaaagggaaaaaccttgttcacttcacagagctgatgtgagaatcaagtgagacagcatatataaaagtgccccgaaaactgtaaagggctataaaatataagatagtgtggtaaagaggtatttttatacagaatcaaaaggtttttttgtgtgtgtgtttgtttgttttcacctcattttacgttttaactactaagatcctttttttttttaaatgttacattttacgggagttcatctaaaagggcagaaacaaaccaacaaaaagtccttgaggagtatctacctctactcctgttttctgtatgaaattctgtaagtccctttggaaacctcagtaactttctttctttctttttttttttttttttgtgatggagttttgctctttcttgcccaagctggagtgcagtggtgtgatttcagcacactgcaacctccgcctcccgggttcaggcgattctcctgcctcagcttcccgagtagctggcgcatgccaccacacccgcctaatatttgtattttttttttttttagagatggggtttcaccatgttgatcaggctgctctcgaactcctgaccttgtgatctgcctgccttggcctcccaaagtgttgggattgcaggcatgagccaccgctcccggccaaacatagtataactttctacgcagtgtttttagttatctagaagaaagtctcctgccatgtaagtctttaatataatctgaaattaataatgttctctggaaacaaacaaaaaaatcttgcccacagacaatatttattcttatgagttgtcaatctccttagcaataatatgtcacaattttgtctgctgcaacagaagaaaaacaagctgcacacacaatacaaaatgcgcttaatttctggagggcacaaaaggtacttgcaatgtcacctgaattaaggccattgtacaatgaaccaaggaggaagcaatgcaagtatagcagttttccaatgatcttgatgttttctaattctggcctactttcccttattctttctgatgatatcatcctgttctaaggttctgagctttttttttttctttttactttttgtcatatatgttcattctgctaggaaaacatggcttaatgtgtgcatttgataccaggcttacagaatgcaagcttccaaccaactagtctatggccaccatacatccttcaggaaaagtcaagctatccctgatgccccatgattcaagctgtgcaatgtcttccaaagcattcactctgaactgaatgaacacctcccaaaatgcattaatacagtaataatcctcacagaaactggtagatcaccactagctgagattctttagtatgaccaggaagcatgttgatatagatcatgcgctctgcagagaaagagagagaagaaaacacaaacaaaagtctttcctcactgagtcctgtcagtttcccccagcatgtaaaaggtcctgtcccaaattccctcccatgcgttctagaggctctccttttgttcaccttgacacactcaaaagggaagcacaaaataccgtagctgttttaaacagcaagccatgccatgtcacctccctccatacaggtttggctgaaacatctgtgggaaaaggggctgcagagaattcagtgaaacgtaagcaatgagaaaacctttctatcctcttcaattactaaaaaatgggaaaggagcatcattttcaaaggaacaaatgctacacaagacatgccctttaaatcctttttaaggttctgtgacctgtgaaactatctgcaatatcagcaggagaaagccctttccagaacaaatgcccatgttttatgtgtactgtatttgctaatcattacttcataagcaagagtagatatacagtgggctataaataatggcgggaatataaaagtgaattgatctgtctggctatctagtaatactcctggcacaagaccagtcttgaatggctgccaactaccacagagccagccagtgatttgtctgggggtcctgccctgtcaggcagaaaacagtcttaaagctgaactcccaccactgtgtgcacggctgagatcgcggtcatgaacatttcttgcagagttccctttcaccaaatcagtccaaaaaccacttaaaaattttgtcagaaaagaaagcagagaaaacaatagaaccaaaccaaagtttaaaattcataaagaccttaagaatccaagctggggtcatgagagaaaaatatgaaatacacataggcagccaacctgaattataaagggcgccagtgaggactggcctgtcgtcccaaaggttatgagagttaactacatagacttgccgcgaacctcaaagcatacgaggcaccgaacttgaccatgactggctgtgagcttacgggagcggacctgctgggactttcccatggaatcaatccctgcacaattctggacattttagcatctaggccccacaaatcgggtcagtctcaactccaaatggatgagtttccctgacaaagaagtggggtgtctccgcagcaagtgtgacaaccagaaatatttctaatcaatctctcttgcaaacggagatacagttatggattgatcatcaccttccttaatttcctctcaggctcccaccttcaccccatcctcccttctggagtaggtgagtctgatgccagaactggtggcctgaactacttcttcctgcgcatcagcactgcaagaccgcccgggcagcacactcacctcgggacgccttgcagggatgcagtgactgtctggcactgtttcttgtatccctcaaggctgtctcccaagttctttgtaagggcagccctagctcaaaaaaacaaaaacaaaaacaaaacaggaacagaaagaaaaagagaaaaagaaaagtaaaaaaggagaaaaaaagagaaagtcctatcaaatgatgagctcaattccagccttgctaggtgcacttgactcccagcctcaggcagatgagggctccgcctgagtgtttattatacatgggcaacgtccttacgaagagataaagtaacagagaaggctttcatgaagatggaggggcgcaccctgtgaatcaagaagttgctaattatttaaggattggcaagttgaatttcctcaaagtgatgcacgtttatggctcagagaccacacaagggtgaggcggctgctttgtttggatattttttcatttttttttattgaatttcataaataccaaccaaattcaaacaaaactgatttagatttcacctcgtcacttaaaatatattttgtcgagtacagtctgtgcagtaatcctctgctatactttaatttggttttaattttataggccctgttttaactgcatatttccagacctttatttctctcacagctcttagcaaaatggtagctcataaacacaagctctgctgtatagactttgcatttcatcccaaagtatttccttttttatagccgtggtctttccatcttagtgctgtgagcttgggtcacaaatctctctgctattccagtgtgtgacatcttcgctcgtttgccgctgctcattaacaaacaatactgctgtgaaattggtttaatgacaaagtaataaaattgctattctgctcacagattgcctgaggcactttgagctcctacaaggcttactgtgggtgccaagatacattaagctgcttattcgtaaaaactgcatcatccgttttttcacaggttttttccctttcctatccagccccgcttctttttatcttcaaataaaaagatatatttgcttatgttcttccaggctgtcaaatttttacttgcatgcatatttctggaaaatgaaagtatatttcatttcctttttttttttttcttgaaaggtcactctgtccctactacaaggttgtccctggacagaacacctactgcatacaacattaaagcagacttatttttgtacattatgtaagtcagagccagggtcgttggaacctattttgggagagcaagggaatgaaactatttatggaatggttttaccttttcaaaaaaacaaggtttggagaatccttacaatttctctcttcacattaaaactgaaaattttagatgaaaacaacccacacgactctggtggtgactattcacattaatattttatgaataataaaatacgtctgcattaaagcaaaaatcttcagcaggcacctgttttccataatgaattacatgttctgggaaagtagcctttttccatttgtctaatgcccatccagacctgaagatttactgctgcaagacaatggggaaataacccaattgcggtttgacaggtgggcaggtcttgataattatggccagacatcttaacactgtgcaactgatgtaaataaacatccaaagcacagatcaatattgctttcctacttttgcattttgaacaacacatgctagcaatttacatcctttctctctttctggctgattggaaaggctgcattcatttaaacacattgcatgcgtgcacacactccacatatttcatttaaaagtattcaatacaccccaacagccaggactgtactttataatcacattatagtcacctgctggtatatttctattaattatgtaaacggatatctcaagagctccaaaaagcatctgaattggccatttgaatacctgcaatacctggatgataaatttaagggaaacacgaaccaggttggcaaaaatacaaactgtccagaatttgggcatcttttcttcctaccgatgtgcttggcattctttacaatttcatgaactgtaggtgcttcctcttctacatgcatctgacctcataaatctcagcaactggagattttattacagcagccaaaagatttgcaaggcctgccaatcctgctgagaggctagcccccctgaagatgagagagggtctgatgagtgatgatgggggggtctgatgtaagggagcatataaaccaggggtacagaaataagtggcctgaggaagcaaggtgaactgtttccacagagaggatctgagggaggcaggtagagaacctggaaaaaaggcaagaatgggcagaaggaaacgaaggaaggaagggctctgatgggaaaataaggtgaaaggaaaaaaagaaactaacgcaaagtgggattaccataaaataacatctacatgttgtttattctcatcttcagaccttgttaatctttgaaaggagatgttatgtactgtttcaagagccctgtatgagttcattagatgtgttgcttctctcacagcatcttgacgttaacacctttttctttttttaaatctttaagaaatatgacagtcggagggatgagaaaacgtgtttctattttaatataagaaacaatagactatagaggaagtgaccaaggaaactctctctgggatgtaatgttaacttaaatctctgaaaataatgtctgttcccttctctacatgtgttaggatgtccacaataagtcattttctctgtatttagaagcctgtaatagatcctgtcagctgtttgtacctcaatggtacacattataaaactcaggtatttaaatttaaatatttgataaataacataaataaacaaatgcttagaggaaggaaaaaatactgctgaaaaaaatatttacagccggccaagatttctggttttcatgaccattttgctgtgacataaaccaccatcatttagaagccatgaagtgctcaaattaccagaggcatttgtctttattttcagaatgcctctgtgaaaatactccagcatcaaaagcattaaaaatcttatgaaaaacaaaaacgttgcataatagtaagatgaactatttgcagaaagggagtatgaaattcctgaaattcactttctgtgctatctgttaaataatgctatttattaatctcctaccatatgcagaaaaatgtacagggtttttccaggaatagacggagaacagaaaatgtgacataacaacaattaaaacaacaacagtaacaagagttactttttggagctcctaccaactgtcatacagttctcacagtaatattctgaatcaaaatcattatcccagtttgatggatgaggaagctgagggaccaagttcaggtccaaaccgatagttaatagtgaggccagatgcaaactcacatcctttatgttccaaaatctctcctttctactgtatcctactgcctcttcataagaagtgatttaagaaaaagtaccaaatactacctgtgtgtgtatgcaaactattcttctaagtaatgtcagagagtttatgtaccctctgttacctaatcttgtatataagtggagatttaaaaagatgtgacccatatttgagaagagtcttctgaggaacaattagataacatagaagagtacttagatattttttaaagaatggtatgattagaacacagtcaatattgtttttcttggcttagttagaaccaattgaaaatagtatcttctatcttcccctgtgggccaattccttcattctggatggctgaggactgcaccattaaccctcatacgctcttggaaaatgagtggcactgcttataaaaaaagatcaaaaaaagaaagaagggaaagaaagaaaagcaaaataaaataactcacagttcatgtctaaatgatcatagattattccattataaacattttaaataaaaacaaacaataactaattatataactcttctgtcttcctcaatagactggaaactccatgagggcagggttgcaactctggtttgctgatgtctctctagcgcttagcattataaatatttgcagacatattaccaatcaaatattcatatcaatataagaaatctctcaacttaaagacatgttacttacatgtgtctcattcttttcaacagctgaatttcactgtagtgagtcagtaagatgaaggaagaagtggaggaaccagaaaggaaagagctcccttccaaagaccaataaatatcagctctggccaaggcagtctgctctgacctgtgggtatggagtataaacttccttgtgcatgcaactatttttctcattttagattttattttctcccccaactgtatggagtttccctacattttgagatgaaatttgtacgagagtattgtgtaggcttttgtgggcatgtttgggcctctgcatataactataacattaaacttcagggagaatacactccaagttctaaacaactgatgtaatagttttgtacttgtgtcatttacatttgattctgaactggaagcaccatgaaggcagagggtccgctttgtcccacttctgaatagacctcacctagcacagctcctggcaccatggcaggtatttatgcaatggtagatgcttaaggaacattagtgggcagactgaatatgtggttttgaaggaggcagcaaacctatttctccaattatacttgatgtgggctaatattaggattggtttggattttctaaacatacagagattgatgacagaggtgacaactcagcagaaaatatcggttgtcaagaagaaatcagttgaggattaaaagttatccacagaggcccggtgtggtggctcacacctgtaatgccagcactttgggaggccaaggtgggtggatcagctgaggtcaggagttcgagaccagcctggccaacatggtgaaaccccatctctactaaaaatacaaaaattagccgactgccatggtgggcacctgtaatcccagctacttgggaggttgaggcaggagaattgtttgaacccaggagacagaggttacagtgaggtgagatcgtaccactgtactccagcctgggtgacagagtgagactcagtcttaaaaaaaaaaaaaaaaaagagagagagagagaaaaaaaaagttatccacagagaataaaccacagagatatgtagagctgattgcacaaggaatggttatataaaacattaagggtcacccagaaataaaaaggagctgccaaagtaccaccaaagaactcccagtaataccaggagaggtcactgaggctggcaagggtcactaagccatgggtaaaggcacaaccaaaggctcttcctttatgcacttaaagctgtaagttacgctgacaaggtgcaaacatataggtttaaagaccctcgatgagcgatatgcattatcgctcattcctcattcccatgtcctcggcgtctaggtttttaatttattttgttgttttgtttctgaggttatgtttagcacatttaaaagtagcccattaaaagaatttccaacttgtttctgaagtcataagcaaaaaaaatgacgaaagctttgccaaaataccaaggttgttaaagaagaggaaagatacaagactgggacactaactttaaatgtaaacatatactgttcatgtatgctcatcatatatacgcacatctttctataagtacaaacatgagttattttatctatcacattatatagcaggtgaaatacaaaagtgaaattagacctctctttgtgggtttgatattgtttttaattacccagtttccaccactctgaaataaaccacgtagttcgaaagttgcctgagttacctgcctggcaatggtaggcatcaaaattgcagtgagtaagtggtttccttcacactcccaagtttccacatttttttctgtattggttcagcccattcctaatgtctatgtttgaaaacattcctagaaaatttcctttcactagttttgatagattccctgacttcattccaataaagaaaatataactcatcttaaagtaattgtcgtgaaggacagtcaaatgattaaaatttgtcatcagccaagagaggagagaagaaaaaagcctatagcagcaaactcagtatatcatgggggaagacaaacaaacagttaacatattgaaaataaatgctgttttgtacagaatagcacaaccttgatgggtgtactactgtatctgaggctgacattacttcaagacaacagagtaaagaatttttgctaccaaggcgtttctttcacttaaaattcaaatcagaatacagcttttgtgttgtaacttttaaaatatggaatggaatgaagcagaagtttgttcaaaataacaccagcataatcttaatggcatacaacaaaattgaaacaacgttgatgcttgctttttagaagccacaaagcacttctattttgtaaggccctgtgacattgttgcacatttgaaacaacaatggcaattagggaagtgccccggaaaccagaaaaatgcatatggggttgggcctatgcatcacagaacagaatcaatcttcctaattaacgacaaattagcaatcccaaaatgagtgggatcaacctgtctccactggccaagaatcatgctaagtatagagctttctctaagtgcctctaaattacatttacacccatataaagtaacattcttttaatctaatactacattagtgtcgctattcttaaagttattacaccgtttaaaatttctatagataggcggacagataaacaaattaatagacagatatgcagataatcagacatttcacaaagagggacgctaaggtggtgacaaatcactgaaaggcagtgcacaaaatccctattagcatgaagctcaccaaggaagaaaagtttatgtgtaatagtgatattctttaagatctaatggctgtttagacatatactatattttttttaacatacagagataaacgttaggaaaaaagtcaccatttagaggagaataattataaccaaagcagacttaatcgctaatgactgaaatagcattttgctaaaattgatgtgctgttgggtggtgccattcaatatccatgtgttaaacattgataagagatgccgagttgcatgactctgaaggtgctgatcacagcgttgtctgtgcatatgatgcgccctggaattgtgcagtgtacagagtgctcaggcctctatagtggccctggctgtaccatacagaacaaaccaaaaggtattgctcataattttatgaatttaaaatctaataaagtgagaaccatctgttgccattttaaaaattcaattaatttaaatttcatccaccaagaaaatgaggaatagtgattatggtctttttttaagattagttaacatatttccaccaaacttattagaataggaagtttctttgttgttgttgctggcttttgttcatttgtttttggatttaattgttagagggtccattgaagggccctaagattgtgggcaaaactgtatgtgtgcatgtgtgtgtgcacgtgtgtgtctgtctgtcttctgtctgtctatatgtacatattcctctggggatatgtgggtttcattacattgtcagagaagtccatgacccagcaaaggttcagaactagtatattacagcctattgttaaatgaggaaaagctttgagtggtatgttgaaggtggctccgagtagccaaaaagtgatggacaaaggaattcatagcctcttgctagaaagagattattcaaaatttggaaaaatttgctcttccaaagatcagaccttgactgagggcccaagtgagtaaacaaatgagaactctgaaatctctccagggtagcccattagtttgacatgaaacacacgctatgtttgggcccccttctctcagcacccacagtggacaattttagaacagactttagggtctgatctgagaggggcgggatagtctgttgtactccagagtgagtctcaaagctgtaatcctgctgggcatttccagtctgtgctgctagtgaaaattaggtggctaggctcacttttgaactcactcttgaacaagtaggaacactatctcagcatcagagcagtgcggctttctatagggtctgtggtctaagaaaaaagccctaaaaattagagggtcttcccaaggccactattcacaaagactggatatgtgtatacatacatacccatacacatatatgtatagttgcctgagaatctagtcactgaggaaggacatctccatctacatcatggaattttaatctcctccatcaagtcattttgcatttttacataacctgcatggtttagagaccattgagaaattgatacctcagaaagagataatcctttttaatgaatcccagactctagtgccaagtattcttcttcccatttgtttagcatttatgtgtatgtgtgtgtgtgtggtgggggtgggcggggggcggaaatttggagacacagatttttaacttattcagaagggattaacagtgaaatcgtactacctgtttcacattttgacttgtgaattgagtatcctaacgctttttgtttgactctatttatatgactttccaaaagcccctgagaaaaccacttcaatttatgcattggtttacttctctgtacagaagagtaagtaactcataagggtgttaggaaactaagtcttgttggtaaagtgctcttctaattggtgcgatacaagtggtgattattattaaatggttgtcactgtcacctctgcctgaagccacccctatctttaacatttcttttatttttcaaacttcctcttttcaacattaataaaatatttgtcagctatgcatatcacataaatgcattagggcataaaagctaacattttcttttaattttaacaatgtgcatactattggtaacgaatattgaaagaaatacaatgcgtaagtagattttacaccacattagagttgtccaatttctcatgtttaaaatttttctgcatgactagagccaggaagaaatacatgccagcataattatatgaacagttgaaatttaaacatattgaaaaggagaggagaacatatccacccatttgtgtttttttttttcctccgtaacaattccaaagatgagtaatttcttttcatagagtcaggctgaaggcacaaagctttaacattcaaaggagggaggtagggggaaaagaagcttttttaagtactgtgcaaatcaatacacaaaaaattctcaagatgatagtttaattaaaacgtgcacaaggcaattcatcagcctcttcccttggtgtactagcctctagaatttgccttctgctttctgatccctgatggttttaacttgaaggcatttaaaataccgttcaacgggcacctttccacttatcttacattccttgtttttctttataaacaagtaattgtactggctttgtgatgtttgttatgcttcatgctttttcatctcctgtatgagctttgcctagcatgaaatgctgtcatgcagtgaaatttacctgagagctaaagggagaaagaaaaatcttccaagtgtatgtggttacaagttcatagccagctaaatcactggcaattttatgctaccagttatttcaatttagatgtttgtaaaagtacatctaaaaataaaataaccactcccatagtcatcaaaatgaaaaatctgcttggattagaatacattgtaagttgttttaaactaccatgtgggaatgttaatattattcaattcctattatatagtgttctagggataccttggcagagacataaagctactgaactcttggctccttaatagtttgactcccattgtaattgctttgttcactcgctgccctgggtcttcataattggttagagtccaaggtcacagattcagtatggtagtgggagccacttagctggttgttaagtttccaatggtagcttgttttcagttagtattatcttttttccagattgagaaattcttttttctttttttttttttttttagcggaggagaaattcttcttttcattaaataatctaggtatgtgcctatgatgtttttgttcagcctccctccccaacttctgcatacagcaatttttaagccaaaagccatccagtaatatattcagcccaaacccaaactaaattttttgaagacttgttgaggttccttaaatgttgcatttttttttaattacaaatatccatttggatggactgtaaatatttcatttaataaaatttgtttaaaacatctcaattcagtgtcttagttattaatttttcaaaacattcatgaacacaaaaatctaataataatcaggaaagagagagctttaacttttcttaaaaccaaggttacaacagcaatataaagttacgtagaaaagaagctcatcatatgatcatactgcatcctttaatgtattatttttttctttctgagataatttaacaattgaaatgaaaaaactttggaggcagtgtgtggtgtattagaaatgactctggatctggggccttgatctgtttgactatggctttatctctaatgccctcagaaaatcattttccccctctgtatctcagtttttttttttaaataaaattagagttttaggttcaattatctaaaatatctttcccacttataatttattttatttacattagccaatatttagctcagttaagagcttcactttataagcaactattcagaattgacaggaatattattttacattatgaattccccattacctgcaaataaagcattagtaccattgaacagtttttgctgctcagataagaccctttagggcatcttttaatacagacatcaaatattttacttgctctgtctgcatttattcgataagtattaggtgagtttcctactatgtaccaggcactatggcaggcacccaggatcttggatggcaaatcgaccacagtttctgcctgcaaggagtgggaggtgcattttctttctttttttttttttttgagatagagaattgctctgtcgcccaggctggagtgcagtggtgcgatctcggctcactgcaagctccgcctcccggggttcacgcctttctcctgcctcagcctcccgagtagctgggactacaggtgcctgtcaccacgcccagctaatttttggtatttttagtagagatggggtttcaccatggtagccaggatggtctcgatctcctgagggaggtgcattttcttaatggagcaaaacttttcttcagttagtttgacagtttctataaagttgatggtaaacaaccatttctcctttcctgagcacaggcttgtccaaaagtgagtgcaattgagttttggtagaggaatgtgttcctgagaaccatgtgaaagatgtattataaaatgtagttctactgtaattatgaactgactatatttgatattgtattcaatgcacttctttaaataaagatttaagagtcacaaaataacatattctcataaaatgactcaacctgttatactattcctttttattatgaatgcccagttttctgaggaaattgtacaattttcatgtatttctccaaatatagtcaggactggatggataacaaggatgattcattcattgcattcaaggggaaaagataactgttttcagaagaatttcaaactcattaaaaagcatttgtttgagatccaagggttcctctgtattagtgttaaccaatgagaagacctgacaaggaatatgcttatttttgaaagacttcttgatacagatgaactttggcaataacaatatgtcaacacaaacggtgaacaagcaacccatgaaagaggcccttaggaaatagattgtttagtgagtgggtgaaggaaagactgattaaactgtgttttgaggtgggatatgatattggaggtacaccacaaatgtcccactgatttatatatttaaatagcaaaggtatagtgacttgcagattctcaaatttgtccctcccttgttgtttggtcaggaattaacaaaatagacagtcctcaaaatatcaacgtctagagtcactctagacaaccttgacaaatgaaggtgactgggtgaagaaatcatttggtctgatcatctcaataattccaaattcaatagctttttgtgaaacgctacatgtaactttgacctggtatgtgagtttgtttgctcttctgaataggggtatctaccttgcaagaagggatttaagaaacagcttatcaaaataccaggataaggcactgtgcacagtttctacataaaagctaaataagatatactttttataagatggtatttcatttttcactactgctgccttttaaaaatttataaattgctatgaaagtgacaagccaaaattgtatgaatggtcactgttgaagcaaattactttagagtggaactcacccacagcaaaatgtctatgctttccacagccagatcaacaacatactattaggaagatttttgttgttgttgttttgctgtggacctgttagggatcaggatgctacaaagagaaacaaacaaacaaaaaaaaaccatgatgtaattccacactcttaaaagactttttaccctcacaactatggaaaattgggggttgtctatttgagtcaaaatttttatgacacaaaaagtttactcatttattatcctatgtaaacttgcaagaggaaaggcaggcttcttactttgcctactattccatttttatgaagaattttgtgctttaaatagatgtcaaactttttttttctccaaccctagttggtctttccacagttggagattttaaacgatgtttgaaatttggttctatatagctttctgccttaggaaggtcctctatgcctagatatggtatgtccttttcagggaccctctaaatcaaagtgtggctttgcccctgcgacccaagctcctccaagcacccgctgtcaccaaagcctcctctctttttctggatgagctcatctgctcccaggactgcaataacatctataccctcagacctacctttccctccccttgtgcggtcccacagtgcttcctgttattctgacctctttccctacagggctcatctttattttatgctacctattgtgaaaacaaaatcatcttcccagagaaaccatcaggccccactcagatctgctgtcattgtggaaagaatccccaagcccctgctcccaggggccagagcccagagttgtagctcctttttctattttcgtcccatgctgaattagccaccaaaacctgccacagttataacaatagagataaaatcggtttctttttcttcattttaatagctaaatctctgattcaggttctgtgtaagtcacctatcatctaccacgactggcctctgcatctcttgttctaatcaattcaaaatacaatggttaaaatcgtttttcctctcacttgctttggctagacttttattttcagttcacaggcttagaatcataaaatattagaattttaaagatagaaaggaccttaaaaatcacccagtccccattctcttatggacgagggaatagacactgagaaaggctaaactgaccaagatcacacaagttgtttgagctggaattagacccaagctgctgatgtccagcccgttctctttcacgcaccacactgcatcgtcttttgtcaaacactgaaccttcctccatgctgtccccgctgcagctctgtggacaggggtgtcagcctttctcactggacctcgtgcacttgcaaatgtctttctctcatcaggcagagctggttcctcccagactcctttactcaatttccctacttccatggtctctcgtactatttccatatgactactaaaacagttcttcctgattcaaaactaacttccaatctaatctcctccaagaaaatgcatgctaatagctaccctctcacctcaataactggctttcatgcatgtttacttctccagcccactctctagcttatttgaattcaacccaacgaaaagttatgcatacctactaagagttatacactgcggttctgaataatccctttgtcacataaaaggcagaaaaaaaatcccaaagcaatctggcaattatttcagatggtcaactagtttggaaacagagccaaaggtcagggctgtcactcataaaacacaacctacttttattctggtgtgatgtctaggagaaccattttctctttggatccattttgctgtctttgcaagtgttgctattgggctatggaagagtttctaggaaggtctagcaatagaggtccttattttttttttttaatttgttaatgatttactggtgttattgggaaaatcataccatctccatgatgtgccaattttctcaagaaattgtacctgtttatcctcagaacaaatacaattcattgtaatatactgcaaggggctcgcccacaattgcttaataaaattgtgtcattaaaagtattatttaaaattagtgaactactgcctgggctggaaatttttattgtataaagattttctgttgtaatgggatttgacttatttataatatctaaaattctgaattcacctcatcactaacttgatggtaaattggcaggcattacttacttagggtatgggacgggtaagctttccttctgtggccaaattattggcaagtctttcattaatcaagtggaagataaattgcgatggcaggatattggttcccatggataatctaaggacatgacactcttacatagtaacagatgctcaaatccctagggatatagcatcctgaaaatgttaccctaagtaggagctacaagtactggttgctgagatggaaccaaagtatggatgtgccttatctgcagagctttggaactggggcatttttttagtctgtgggttatggccccatttccaggaaaatctatctgagcctaatgtaacctagcaaatctttcaaatgaaatagtcttgcgggaggcaagttgtcagtttctgacatattatttagagctcagttcaggtttccttctttcttctttccctacttaaaccccctgctcattctccataagcgccattttctaattaaggaaaatgaaatttgtaatgtgtagaagggagacatgacctcccttgccagccagtctcgctcctccctgcacaccattaaaaatagaatccaggggtggttgtttttttaattggtatcactttgtctttagtgcaaaacacatggcaataatttagtgaactccagtgtttctcttgtggcaaattgatagcataattttattatgagtggaacaatgacttctgggagcaggagagattctctcagaactacacataactcggttgactaaatgtaatacttggagaaggtaatgagaatagagccagggctcagcaaggactagaagatttcagtttctcactcctgtcaaaaggctactcaataaatcatacctgaagcttatttaatgtcagaagccagtaagctgacaaagtgcattggggtgctcacctcagaaaaggcacacggagtcatgtgatctctggtccctggacttgatggggtcatagaatccatctatggattttaataagtaacctattatgttccctttggtgctaattattttacacatcacttgtttcctgtttactgacattgcttcagtaatttcattatgaaaaaagaatcacaaggaaagttaatccctatgacttttgccattctattccacaggcagtttctgcttttctccccctccattcttcttctgcagcaacccattccacctaacacaaacacggaaacacagaatccatgggaacatcacaggataacaggaaacctgcaatgagcaaagccaagcaaagagctaccctgagttacacagatccaagactatcaggatttagtaactcacggctaagaaagtatttggaatttaccctaactaacccagcctcaggtcacccaggaaacctgtgaccaaattccatggtgctaatttctacaacctttatgaaaaggaaatttgcccatgggcactcaagaatccctgtgcatccttttaactgcattgacaaagaaaactatgagaatcagatcaaaacaacaaccacaaccactaccaccaccaccatgactattttgcccacctccttatgcattgtgttgcatgcaggttgagtatgcttatccatcagactactggaatcagaatcttctcttttggaagagcgtatttttctgaattttagaaaaccatgtgcagagatcaagaaaggtagcatgtgttttataatttttaagtgaactaatatccaaaatctaggttcaaaatataagacagtttgactttgaaattaccaaaatgtcaatactggataggtaaaagtatacaaacatctgtgaccatctctgtaaaggagatcaatctatcaatcacggaaaaaggatttctctagcaggcattcttacaagatactcttagtcaaggaagacccattccttcctcaagaattgagttgaaaccattaagccaagaccattaaagagatttttcacgtgtgggttttgaagtagatttgaatccagatctttggggattaattcactattccatccactccttgagtaattactgctaaagttggttgcttatctaaaggctttaaggaagtttggaacttaggaggtcgacattaaacagcctgaaacctcagcctgcagggacttatctaaaagataaagtgtatctagagacacagggaaatctcatatctctaaatgtttaccttgcaaaggaaaaaagagaaagaaccttgcatgtgtttcagcctgagtgcagaattaaggattctggatgagggctgggagttagctgaaaatctccaccgaatgatcagtcagcaatgacgattctgatttatgcacaaaaccaaaacaaaacaaaactggaaacaaggttttctattataattacagtaaaaacagtgaagtaggaaaaagacttggagaaagcaatattttttacaaagtaaggctctatgtatttttctacccaggtttctaataattttgcagattagaaaatgattttccttatttagagaatagagggaacaattctgagtgtcgcgaattgggcggaattcctggagtaagcaccaggaagcgccacctaaccgatgctcactctcttatacttgaaaaatccaacacaatgaaaacaacagcaacaacaacaaaacaagtcctcaagatcacgaggttaataggacctacatttactcattaccagagcagattctcaattaagtaatttttagaaggctgctctccagtgaatcaatgcattgaatgaatgagtgaagtgaaagaggatctggtctaaagactattcataaagcacttatttctctgagagtgaatttttggaaagaacttaaagactactcaatactgtgggtaatggaagaaatgagaaaaaaaaattactggtaaaggcaccaccatagtaaaaaggactgaagattcagaaccaggctatggcccccaagactcttatttttaagagtaaaaaaattagagaaagtaaacaatatgatattggtatattctgatctatctttttaccttcctttcaatagcttctaatttaggggcttgtttaaattttgcatttacaagccccctttctattttctgccttctagaaaataagttagagggtaatttgaaaattccttttttaaaaaaatgtttttttaaaatacaattttactttatccatctgtgactggggctaggaatacttactgaatcagttgctatgggataattgtgtaatatttgcaatgagttatcttcaacttttttcctgtttaaaaataagtaaatcgctaagtcaatatcattcttttaaatcatgcaacccactgaaatatagacttttgtttctgtgttactttgagaaaccatgtagatcatgccaattgagatggataaaggacttatttgagcaaactttgtctcccatccaaatactggtataatgaagtgcagaagtaggtagaggcttgtgcctaacacaggacttgtctggagtttattgtctccatcaatgaaagagaggaggataattctaaaaatcttcaaatatcaaaaagggtctacgtttttggccaaatttctttccatatttagagactctgcaaaaaatggttactttcagcatgagaaattttatcttccaaaaagttctcatttaaatattttctttaaggggcattttttggaactgtttcagaaacttgttgcattccttttttgttgttttgtgttttctctgtagcactgtactttcctctaaactaggaactttttttctccccttattggcattccaacccagcaaagaaatatgcatcctgagataatgctgccagcttgctatgaaaaccatatttcattctttctttgcagagcaaaagggaaaaagcacaaaggagctggtataattgaatgtaaaggattgcagcaaacctcccctttgagtcccctcgctggcattcccttcctttatttccccctctactccttttgtttaccacttttaaaaggctcttgctgagtcttagctgcttgcccaaatttggtctgaatctaaatttctggaaatggtactcccatctctacaagatagaagggtgtctagaaatgctggtctgacaccgcaatggattggaggcacagctgcctaggtacaataaatacatccagtgttcggctcagtgtgggaatttcatgaatctgctgcaggaagtaaaatgggaagatacggtaatgcttcctcttattcacaattggtatgccatgtgtcaatgccctggttacccccagttacatttcctgtagacagagcaaaatgaaacccacttaaatttcagggcgatccctctggttaaacattaataatgtgtgtttttcttttaacatcttttaatctctttccccgccttcttttggttttcttctcagaaataattgtaggtctccaagaaatgattatatgaccatggagacagaatgactggaaactggacagagatgcaaagagattagaaactctactgctaacacaagcccagttatttcaacccatgagtgactgtcggcaagaaaatgctctagtttagcaaaagacttcatggggctggttggattcacaccccttggcatctctgcctctttccacggccactgatttttctggcataggaagtgatctgaaagagaagcattttcacctagagctcaccaaagcttttttgtattcatttcatcagcatcggcagtttcagcacattaaatgctgacaatgaatctagcacctggcaaatctgacttgagattcaaatggatttttattcagaaacatagatgttacttggaaataatcactgaagatggcagctatgcgtttaacaaatggccgcggtggaaattgctgagcagagagaggatatttagtccagcaggcttgttccctttaggtttatctcgaccccacctccctggtttatcactctatccttcaatcctttctctcttgagataaaagtgtccagctgtctctgtacctcatttagatttcttgcaccactggccaattattccatatgtttactatgaaattattttcctcaattcccagcttactcttgatgtcctaatatcacaacatatttcctggtgtctgctctccttgcagtggaatgacaacatacacacctttgaaaatgacttttctttgctgtaaagaagtgcaacctcttctagcacttaccctgcctcctactaattaggcttcaaattgggcttggagattcactgaccaaggcctgaaactgaccctctgtcttgaaacccacctagaacactattattgcccttcaagtataagcagcaaagaaaagcatctgggcacccaaatctatctgggctgatggatccaggaggcaaatgattgctttccttaggctaccactcagttcctgtccatattttaatcagggctgagaagttctcctaacaatgctaccttttattttcagagcacttttaacctacaacatgttttcacacacaaattctccttttgtgtcagcatcattccatttcacaccttagaaaaccaagtcacctgggtggttaatgagccttcctgaagggaaagagaagaaggctagaaagggaaactgattcttttctctcggcacagtcctttaatcgtaattgaacaagctcctatatattcttgaaaaattcatcaatggggccaaatggaaacaggtaaagcaaaactgccactttccatgaagaagtcatacaaagtgggtgttgattattaaaagctgttagacgtagaatgattgttgtgagaccattttgatgggaaggtggggcaaacaggacacaggtatttaatctcagcttgagaggccattatacaaaggaactctctgaaccatcttcaactggaaagttctttgaaatttcagtttcatgcttttttatctggaggcctggagacagccttctatcaagaaagtaaatcctttattcctagtatacctgtatactgtcaataagtcaccctgtgtgttgtgtttgttggtatacaactaggctgtaattactgcagtgacatgagtttttaaaagtacagtattccttccttttaaaattaatctggaaataggaacatttaagttaatattataattctgatatagcactgagaaaagttacatgagaacatggagatgtcttataattttcctttgtaattttagcttaaaggattttaattgtcaaagactttcctctatttcaatgattactgttactaaagatgtgtataaatgcaactcaccaaatgactcaagcaaggatttcctcatttaaaaaataaccttctttgtcttttgtcaataaatgcttataagtatgtctcctgagaaaataccagagtgttaatatccagaactttctttcaaaacgcctaaccttcacagttatttgaagccacttacctcctacagttccctaatcttacctccctgccatcaaagaactgtagaaaaaaaaaaaaaaaactatcatctgagaagctacaaaagtctatctttgtttaatacagaagttatgcacagtaagttgtctgcactaaatttttcccccttaaacatgcctatttacccctggaagaaatctccattcctatttgtaagctacttaatgtcttctttatatcattgtatgaaatcatgtttctctttcatttttacaattacttattttaactattttaacaatagctatcttacatgccagcaccatactgaccacttagcatgcagagtttcttaaagtcttacaactatatgagatatatatgaccattatctccatttcacagatgaaagcactaagtcttaaaggggtttagtaattgctgaaggtcaaacatctatcaaatggtggaaccaggattttaaccccacacggtctgattcctgagcctgactgcttacccatcatgctatattacctttagagctttaatcaatattcagtcaaattacaccatatttgcttttccattgcaaggaggttattcaggttgaggatatttggttcgttgctattcctctctcctaacgcgtgtactttggttgttttacagctgatttgactctccaccaactgaccagcatagaaagtgagtcttatcacttgtgattagctttgacagtgaggtgcacacattgaagatctggttatcatcttttaaaagaaagtcttaattaggtgattgatgatttatggacttccaagagttaactgtaggaaaaaatgactgagtgtcataaatttcactcctttcctgaagcacatttggatttggttgcatcatcactttctgcatactccctactgtaaatacactggaaaagtccattaagattatttctagcactgactgcaaagacacaaggcatctttaattctcttaattatctcctaaacttcctttttgcttatttcttctaaagttcatcattactggctgatattaacaggtctgtttttattgcttattgctctcatcaagtgcgtgaagccatgttccatcgcttgttactacagatgttatttctcagtgctgcttaactaccctgaccttgtgtggcctttctatattaagaggtaagtgagaagcagaaccagaaccgcaagtcttccatgattgtctgatttttatgcttttttactgctctaattccttgggtgcaaatcttgcagcacacaagcctaatttcctggtctcaatcggagaagtgggcattatttcctagtatagctgactgaatgagtttgtttaggaactacactctgatcccctctgctttttgactgagcactctcagggcctggagaaatagtttctagtccactcttctcatctctcttagtgattactttgtagttaagaacagtgactgtgaggtcttttgaaagtagattgaatagctttctctgttttgaagctgacttcatcaaggcattgggcaagttcaaaatgcactaaaataagtggtgttcactttcaaatttctttctgaaatccccagaagtttgggccctacattaaattcttggtagttttttagaggtatttgctatactatcctcatgagtaacaccttattatcaaagttacggtagccgttaactaagacttggacccgagggcaggattataggatttttctgaaggaagtgtgaaaattaggaagatggaattattttgtagagacagaagtgtcaacgtttatgctgtattatgggaagtatgctgtgtgacagactgtcacatcctaacccttggcattctgtggcaaatatggctcaaataatagagaaacaagaaacctaaactctcacactcactgaactccgtgtatatgccttggggctcaatggaattcagaaaggaagggtgttctttccagttccagccaggtgtctaattgtgggaaatgctagattgtagattctaaaaattcttcattcttcaggtgcgaagagtatatcaaaaactataggtaatggatgataaggaacagtattttcaaaaagaacaagatcaaatatcaatgccaaatatccatgcggaaattttatttttctcagaaattcccatcacaagctccctcaattgcctcaaatgtacaaaaattatgattctaaagcaatgttaactgcgtcatggaccaatgtgtatatattagctcagtctggtaatcagtatgctataaaagaatgtgcagagcaaacaagtctcctgtagttaacaaagaatacatttattttactgtttcagaccactgataacttgtgctaggaacataaatgagaatatgtatgtttacatatatatttacactatgaagcgcctatcaatgtataatcacatacacatccccctccagagggggatgtactgcctttattccaagtttttggtctaaagggtgtctttaaatgtacacagttccaatctttagaagaaaattaaagtgaattcaagtctgtattgtctatcttttctttctgcctttcttttcaggttagcagtttatttctgcattaatcaccctgacagaagcaaggcaactcaattttctgcttctgtaggtaggcacatcactttctgtacagcactaggcatgaaaaggactgcagctaagctttggttactggtgtaattgaaatgctatccacactatagggtgcattaaagtcagataacggcagttcctgtggccaatttaagtagcttgacttccctgggaaaaaaaaaaattgcctgacagataaggcagacaaactggctaattctccaagcatgtctctcattgtgatcctagaaaaatgagaaaaaaatgaatcacagaaccacaaaatcaattgaccctcgggtagctcatcaggcagcgagcctgataaacctaaaagctttgttaatgtctgcctgcctgtatcccacagatagagcactttgtaaatgaacctgctttgataaatatattaaggaaagctgtgaataaaggcagagacttctcatttgtaaatacaacctctgctacatggaattagaatgataaaatggagttccatgtaattaagtttgtataaggcctgaaatccgtgcaaatactttccctgaattttgaaagagaactgtcagttcaattaatctgaacatcaccccaagaatgtactgaacaaaattaagctgctgataaaacctgggccagtattttgataagtaattcctatatcatttcttggccactgtgatcattttatttaatcctctgcccctccttttcctcagttaccctctaagccgtgtacaaagggtggatggtccatacaccagcacgggagtaatctaccaaatcgcaaaaatggaaaaaccttttctcctatttaaaaaaatattagggtaaataaatttctattaggagatactaaaaagcctgtatctacatcaccgctcaaagccaagacaaaagaatcctttccagaactggtaactccgtatgaggactgtgcaaaaacccgcggagtgactactttcaataggaatgacctgaacagaatttgtggctcaattcgagaattttaaagcatcagagatgggaaaagtgaggtggagaggaagagtgatagagaagaagagaaaagaaagagggagagagaaaaagaaaaggaataaatcctacaaaaaccatttccctaggttaccttttcctctccctaatcacccctttcacacctcgaggtagaaacacagaagttatcctcctcgatttcatttgttttagaaaaaaaaaaaaaagagagaaaaccattatttagaaatctcattttagccatgggagaaagacattgatttttgggtcactcaccagttgtttacttggagaattgtaagtcctgtgtcttgcgctaactgtttcttctgctcttcggaagggtacggatgctaatggaaaaacaaatgttttaaaagatggatcagaagttaagaaagagtcacttacttctaagaataaaaccaccgttggtgatttctttagtctatggcttgattttcctacttgcatcttttttatcatgtgttgagaaatgtgggcagggacaagaacccagaaacctgtattagcagccccatgtttctgtcatactctgtagggccagcagtaaaaagcaaggagtttaagttatgcaatttctttaatcagtcagaatgcaaagcacttttgtgatggtgtcagaattttggtcatctaactcgcttctgttgcactaaaggaactggtttcaggccccttttactctcctccctagacagcctatgtaaagcccttattctaaattatctttgtgagatggctcaatataatcatccttctctagttaaatttgagattattgacagtaaaagtttagaaagtgaggtagtatataatcacaactattcttgtaagccatggcaactgattcaattacaacacagtttacttacagtatatttatgttgactcctttatgggacaacagaagattctttcattgttactgttactgctctaacagggtcacacccaatgatcacacagcaaaaggagccaattatgtgcaatacttcatatagaaattttacattttaccttcaactacaacaataagagaatgaagccataggttttggtgttttctaattcttcacttcctatcgaaattcaccaacatttataatgaacagttcttccattatcaagacactttcctctctgattctaaaatcaaggattgttagtttagacccatacctttattttaaaagacactgtactgggtatacataattatgaaatatgtctattaaataggtccctgctctaaattcactgattttcttaaacaaaaaagtaaacttttatctagcatgtcaaagtcattcataaagtagaaagccttttgtaataaatacttcccatcaacattattagagggtgacattaggaacaacaaagtattccattcagaatattctaatcattccagtatttgagagagtgaatgtttttcaatcatctaagattttattcttcaggtatttcatcttctataatagcgtacattatccaaaatgcgcacaattacttattagcaaacccaaatgccattaggttaaacaaaatcccctgtatagcaaaaggggttaactagatttgtattaatatagaagccaggcttttaatattctgcaaatgttaacaaagaaagatgataatgttgagttaatatgggttaagcataaaatgaaaataaatttttctgattgcgaggtgttgacacttttttggctagggcctccagcctgttcctgaaagctgtgtaattacagaaggcttttcccctcctttccccctcctgcttcgagtctacccacattagtaatgaccccttcactgcttcaaaaaccactaatggtcttcagcacgggcaagaaaaatgaacaggataaattggaatccacagtcagtaatttgcatcctatgaggctgctttggtcactcacactcattcctggtcatcaatcgttgcctgtcaggtgctgcactctgccaccatgacaaatactcctcctaacactctgattcgtccaaacaatgtaattgtcctccagtctccttttggtaatggagataatgaatgactgcacaaacaagaaggattgctcatcactgacgccagtgtggcttcaaactggaaaaggcctggagtacaaattttaatggactgaaaacactggttggggtgggaggggcggtggcaaaaaaaatgtaaaaatcctttctattatggcattttcctgccaaattcaggggagttgcaccctttgactttttgaccctccaagatttttagagcctaggtttataggttatttacccaacagaaatatattttgcaaatagcacaaattaaaatgaaaataaggatgcatcacaagagtatctagatctgcattggtaatgtcttccagtgtgctgtttctttatgcagtgtttttgatcttttttgtgtgtttagtcttgctcactgttcactgttgtgatgcatttgtccaaggcagttttgacaaaatgtgggttgtagagtctgtctgtctgtctctctctctgtgtgtgtgtgtgtgtgtgtgtgtgtgtgtgtgtgtgtgtgcatgtgtgtttaagcgagagagagagaaggtttagatgaaataaaggtttagggtgtaagcagaatagttgaaatgggagattactggagagccaattccttcaagtttgattgtaaattttgtaaattctgattgaataacaataattctttccagtgttttattagaaatttagtcaaatggccacagaattacataaacagtgcattttatcttgggaatccctgagctgtactttcactatgaaggcagttgcaaattccatccacaatcattaaaaaaattggtaccttaccaaaattcaccttgcacagatggctttttttttaattaatagggaagaccataataactttaacttatttaaataatggtctgtggtttttgaacattcatgattccatgccccttttatacatggggtggactgtttacctcaaagtgctctggcaatcagccactatatttctaaaattaaaaaggggattgaaaacaatcagctttcagaggaattggaaccatgacaatgtgttttggattaatttacaaatatatgtatacatttaaggccaaactgtggaactagagtatttctactacatgatctatcatatgcattcttctgctttattagaacagacatcctattgaaataataaacatgggaagccttcacttcttctttgatgtatattactaaatgtctgactggctcaaatttaaaataaactttggtatgcttgcacttgaaaactggaagtagaccacaagcaataatttgttgtcagtttccatattcttggactaaagctatagtttagtctgttcactgttgggggccaacccactctagtccagtggcccagaggtggctcaacttactcataagagcacacgtcattgtaacctgatagcaatgattaggattcccctcatcaagaaagagccagcataggttaaactttttcacatctcgaaagaattctaaagccactgttgaatagaagtcaatcacaacaatcctctaactttgaatatcaactgacaactgttcaaaaagctaagaagacatgtatggcttatgacttcacgtagatagaaaatgtattgtaattaccattcttctaaggactcatttgaaagcaagctatctttattcaagatagtgaccttaggccttcttctttttaattttccttttggggttaactaggtttgtcaagtacatggaaatagatctacaatatccttggaatacatcactgggactttttatgggtgaaccacctaatagtcaacttcttttgtgattaacccctctgtgatgatatccaaactgaaaccaatttatcataaactttattctgtgttaaaagaatttatattgatgttttgaaattttaagtgatacctcaaatcacctcataaattagatatgtacaatgaatgaaaaagctagtatctggaaggctaaaaatttggaattaacctaaatgtctatcaactggatgacagttaaataaaatgtgaggttctcatgaaaaggttgtccccatatattattgagtaaaaaaagcaagttgtagaacaatatgtatcatttatttctgattaataaataaataaaatatacacatatctatgcttgtagcgcaaaaaaaatctggaaaaatatacactgaatcatgttgtgtagggcatcgagtagaaactttttgtttatatactcctatattgtctatgtgtgtactgctttaaataattttaaaaatataatatcaattttaaaattataattaattgtaattatatataattatataaattaattataaattaaatataaattaactataatttatatacttcatatctttaagaaactatagtcacttaacttttttatacaatgagatattctcttgcattgtggtaactctttcatggacattttttaaagcaagacatctccaagatcagttctgcctcttaagttaccttcctaccctgtaagtctgactcacttgctggtctacaaagctgaccagatgagtgctgactgaacaatgcacaatttgtcaagttacttctgtgatagtgtaatacaatcatttagataatggtcaagtaacttgttgggtagagtcttagtttgagtacatgcgtggaaactgatcattatgcatggaaagtgatcattatgatgaccacttccttttctttgctcccctccaaggcatatattttatagagttaatccaggtgaccttcattttgatgatgccactcattcatgaaaccctctaagtaatttccctaatgtggataataaaaatgcattgggcagatatcatttattgatctaggactatgcttactaaaatagggtacaggcagacatgccaaggacttaagccctgaataaataaacgcatcttcctggaatgccaaacttattcaatggtccttaatttaatacctttttctttttttaatacctttttattctgtaaacaagaattcctatgctatgaatagaatatatattttcgtgaattttgaagataaaacaagaaacaattaagatattttaaaccaatcccatccttgtagtggaggacaatcacctttccactaaattcccatagcaatttacttggtattcataatttttagcttttcattgtcatgctttatttatatctctgttaagtataacttcctcaaggtaaagccttgggatttttaacttttgtatttctcccccattctttctcagtgtctctaaatatttgtagaaagaatgaaaaaaattagacataagttctcattcaagctttgttactttaaacaagactgtgcttgggacgcagtctctgttatggtaaaatgagagaaggttaacaaagatatacatgggatataaaacacctatagaagttgtaataacaaggtttgtgatgcttaattttgaatctctctgactctctttctctgacaaacatatacacaaccctctcaagttgtctgagcttctagccagtacatcaggatgtagtaaaaatcctttgctattctactgccaagctaactcctgtttctacctgaagcacttctgcatgaaacagtatgtatctcttgatttgtgtttctatattcaaatttctatattttctggatgtctcatccttgtctctagctgttgaaatcagaaccacaaaacattaagagtcaaaagattttggggccgggtgcggtggctcatgcctgtaatctcagcactttgggaggctgaggtgggtggattaagaggtcaggagatcgagcccatcctggctaacacggtgaaaccccgtttctactaaaaatacaaaaaaaaaaaaaaaaaaaaaaaaaattagccgggcgtggtggcgggcgcctgtagtccagctactcgggaggctgaggcaggagaatggcgtgaacccgggaggcggagcttgcagtgagccgagcgactcagtccagcctgggcgacagagcaaaactccatctcaaaaaaaaaaaaaaaaaaaaaagagtccaaagatttttggacagaacttgatctgagacctaatttatgtaaataaggaaaccgaggctcacaaggcttaaataatctacatcaggtcatataaattggctttggtaagagttgggataaccacctgctatcctaacatttagtggaggacttttccactctaacattaatatttttaattgaaataccacttcccctttctttttgataagagtgccctgattttaatttagggatgtaatcagtggtggctaagtgactcaagtttagccagtcaacacagataatcatgctgtttgcattaaagatggaacccaagttaggttaatgggagtcagttatgaaactgttaaaagtgttgttttttcactggggttactaagtcagtaaaatgtgtgcctggagttactaatggctattattgtcactgaatgaagagaacttgattgagaatgaagctcatgcagacaaaagcagagccaacagatacagaaaatatattcctaacatcgtttctacacctataaactttacctaaaagtaaccaccttttacctttcagtcacttcagccaataaattagttctgaataataaacatagaccgatttggattatgtggacctttttcagtttattcccttttcccctccagctagaaatgattgttaaaaaaaaaaaaaaaaaaaaaggagaagcatgaggaggaaaaggaggaggaagaagaaaaaggaaaagaataaaaaagaaatgattcattttgctttaatttctatagcaatacagattctggtcaaatagcaaaaactttagaattgaagattttttaaaagtttatcagagtagtgatcccaatagattttttaaatcataaaatttgaaagatagaggctttaagcatgcaatgtacatgaaagtgtgaacattttgtatctaaattcgaaaagcaaatgacaaggtggaattttaacaatgtttcttaaaatgaccatagagagtaaattttagcatgttttttgtgtaaagttgaaactctaaagtgaaatgaatataaatttgataatcaaaatacctgaaaaacacatttagactcaataaccttacagcaaccaaaggctgtgataatgaaaaataatacaaaaactattgcaatcatctggctaatttagggttatttgaattcagtaaaattcccttacccggctgctgaaggagagtatatttcaaatggtgtgggatcaaaacattcccctccatttccacgattctggcatgtccaagccctactaatccatcatagttcattcaaacagtggaaaaccctcccaagccagaagtagtcactccccacaaacttccacagtgctttctttcctcctctcttgtgtttttattcacttcatattgtcttttatgtatacatgtgcacctgtgtcacatccctcactggactgcaaatcatttgagggcagagttaaagaattatttaacctcaaactttctacagcacttagctcagtatttcctacagaacaagtgttcaatacatacttgttactgaatgcattagttctgaaattggtgctgtttcctgacagaaaggactggctgtgccacagataagatgcataagtactcagatgaatatggagagattgagacaatcatttaactgttttatgaacacaatattcggatatttgaaaacatctctgaattttttacttttcatccagatgtttggtgttatggaaatgcaggcttcacattcaaattagtaatgttttttaatttaatggcagatgtatatttgggaggaggggaaagtgaccatttcaggaagattcacttccatttgagtttacatggaagtaaatagattgaattataataatagcctcctatagaattcagaaaaggtttgagagatgttaataattgtcagatcctaagaaattaaaatgtttggtggatactgagagccacagtgggaaggcctcattaaaaagagcaaagagaaaagcatactctcttctgtagataagctaaaggaatactgaatgagcctgatggattatcatccaaagattttaagaacagttattaaatttattattaagatgtagataaaatagaaaagcggagaaggaatgtcttaagacaccaaagttaatgactaaaaggaaaaaaggtgagtaccttaggataaggagaaacaaaaacatctgcaaggagaaatgttacatatacatattctaacagaatcaagtgagtttatatgaatggcagtgatggaattaagtgatggtccgataccaccaacactcattttacctctaaacttccaaaaaggcaacaaaaatattgcagataagattcagaatttcaagcataacaaatataattattttcctattgactgagactttaaagctgagcacaatcttattttgaatataacagaaatatattcccaaggctagagaaagataatttttatttaacatttgttaggatgctcccatgagctgcttggccatgcatgttatgctgcctacatggctaatgggtaatcttactaaatgagccaaaagccacaaataaggccttgactcatttaacaatcatttcacatttccacactatgaccaaattaatattttatggggccactcaattctacggccagactacttttccaaaaaattgaattttgtacttatttattttatgggtcatttgttgaaatagatttcaaaacaggtttaggctatttagatttttcagtgaactgcaaaagaaaaactcagattcagagttttagacctagagaggatattagcggtcatctaactcaaacttcttattttatgcctaacaaaactgaggttgacggaggcaaaatggcttggccaaacctcgctggctttcctctcttttaagatgtccctgatttctccagtgaaaacaaatttcacacacatgatctcagagaacactcttatggaacatcttgtttctacctaggaattatagatgccaatatccagatttttttcctgcaagttacgtaacacccatatcctacgtctttctttgccaccctatctttccccgtttgccacactgcattacaaatgcttgcctgtttgtctgtcttccctattagaccatatgtgccttgagagtagagactggctatccgtactttactaccagaagctagttcactgcctggcatttaagaggtaaccaataaatacgtgttgaactaatcaagtttgaaaaggtgacaagtgaattctttgcatccccaaaatactattttaaaattacagaaagggaagttagtggaggtaaaagccagatagaaaatgagaaggaagatttaggaacacaaagaggcagaaaataccaactttttatccacatcaaaattgaaatagtgaaaatcagctcttacttaaaacaagaataaaactttatacatgtaaagaactgggaagaaatggcaaatccagatggtgacaatgacacactatggaaaagaaataaatgcattggacttttcattaacatttaatttattcattttaaataggctaagggattgctttaaaacaagagtctgaagtatgtagcagagagttatataatgtctagacaactgagatacttgtatctaatcttatgacaacaatcctacttaacaggtccagacacagtgccttatgagactgagttagaaggaaatgaggattagtgattagtccattacaacatttctttagtaacaggaaaaaaaagtctaggtgaaaaaaatctggggcaaatattaaggaattattaagcaacattaaaagctataataaataatttcagtatgtcctgttcaattttacttgcacagattatgctatgaataattttgtctgatttaccataagaatgcactgaaggtctagttggacaacagatagctaacatggatttaaagaggaagaggttgtttaaagaagctgagggttatctttttttttttcaaaaaggttattatctctagagtaagcaatggaaatgtggatagtatcttctttgctcatctcagagtatgggataacagaatggggttaatgataagtttaaaagttataaaaacaagaaggaagtagctgtaaactaatgacttcttgtgatagacaggagtggttaaaaggagaaccttcgtagtgactgaccatttcttgcaccatattatggagaaagtctcaatcaggagggctaggaaacacaaccccttaataagagttagttctttcatttttaaagttcaccaagacagaaaactctaaggtataaaacaacagcattaggaacttggctgaaaggttcagaactactttctttttctaacatacacagagagcttctttctgcatataaatgagtgtttcatacaagtagacacttagacgaacaccctaagaaaggcaggctcaaaacagctgatattttttctgtttaattatagtctcatattcttaaaatgtttcagaatttatctgacttttaaaaacacatgagaagcatcattaccagtctaccacaaaatatgacaaagtaaaacaagatatcacccaagtgtttaccttagttttgttctgcattgtactagtaaataaagcaatcaactataataaccaaccataataagaaagctcttacccaggccatcaaaaaaggtcagttagcagtatttgttttggaactccccacagttttatcttatcaatttgtttttccttcccttttttttagaacagcctctgcagtgaaagttaaactaaatcaagatggagacagagcaaggtactgccacaacattgtctatctttgggccccattactattttacctaaactacaatgcatgaatacattaaatataaagtatttctgagcatataaaagaaaatcactttgtgagtttctaatttgtatatagacgaaatcaactgattagtaaatggagcaccttcaaaatgtcttttcatcatacctgtgaacatgtatttttctggtaattataagatcataaaccatctaatctacaccataaccaacccccccaaaataaatatacatatcttcatgatctggatatctacggactaaacattcactcgttcaagacaaaagtgattaaatactaaaatatcaaaccacttgatagtatttaaccttttgccaccataatggaatgtaatgctgagtaaatacaaataaattggaaacttacggactaaaagaaagtacagacataaaattaaaagtattcttggcaaaaaataaggctacatgctgataatatgtttatagtttacttaaatattaatatgtggcttttttttcctaatttggacaaaaaaatcagaaaatattcagaaaaggcttttcttagcttgggtaaacaagttgacctcagcagaaaatagtctaatcatctctctactatatttgcttctattcatcaactggacaaaagaaagagaaataatggtggacatatttaaaatataaacatgtgaaggtatacaccagccatatttttttaatccatttaagcagtaagatttgatagaaagcaatagctatttcttattcctcctgatttgtatattagaaattagtagtatatctttatattcttagaaataaataattctgtatttgcaaaaaaatatttcttacaaggatttaggaagccctgaaaatggctgtctccacaaaaacagaaccttaaaaggacaaatttttaatgcagctaaattcaactggtatgaaccactatggccagcaactgctttgattagttgagcattcattctgacagctggtgcctgttaaatagtttgaattgttggttgctgttaaacaattgtttttctgaatgatggtcaaaactctctagcatttctgatgcctggtatgttgtggctttcgcagaagaacttaagtttgacccatatccagcataatgtgaatggcattcatatatcagaataaggtgagttaaccagttacccatagagtatgatgctttttcatctgaaacaaggtatctgtgggggattgcttccaggactccctcagacaccaaaatctgaggatgttcaagtccctaatataaaatggtgtagtatttgcatataacctatgcacatcctcctgtatactttaaatgatctctagattacttataattcctaatagaatgtaaatgctatgtaaatagttatactacactttttatttgcattttttttttactgtcgcagtgttatttttgttgtcttttttttcatgagtattttcaatatgcaattggttgagtccccagatgtggaacccgcagacataaaggtccgactgtagcctgaagtactgtttaaaggtatcttggctactcatgtgttactgactgaatcatatacatgattaaaatatttaatttaaatacctttatttcagtaattggaaatataacctcatgcaacagaagctgagtgggtttcattctctaagttagcaaaacacttaaggattgccacatggcaagaaataagccagaaatggcctttagactctaagcagaaaatcattaagcaaatctaagatactatttgtatgtatgtaccatgaaaatattgattatgctttatctaaatgaagacatttactgacaggaggtaagagaggatagtttttagcaagagattaataggaggaatgaaaattatctcaaagagatcaaaagtgtggatagaaatcaccattcaactcaggactctggctccccatataagagtgaaacttggccaggtgctgtggctcacgcctgtaatcccaacactttgggaggctgaggtgggcagatcacctgaggccaggagttcgagaccagcctggccaacatggtgaaaccccaagtctactaaaaatacaaaaaaaaatttagccgggcatggtggcaggcacctgtaatcctagctaccagggaggctgaggcaggagaatcgcttgaacctgggacgcagagtttgcagtgagccgcgattgcgccactgcactccagcccgggtgacagtgcgagactccatctcaaaaaaaaaaaaaaaagagtgaaacttggatttgacctggatactgaggaaactatactgacaaactctcctccatttagcaccaagtctgacctagcagaaactaaaggaaagactttgtcagttcaggtatttgtaggtgtaaaattttcatacagtgtagagcacaaacaggaaattaaggaagaaatgcataagccactattttataaagtcttcatcttctttccaacctaactagccaattttgaaatggcctgggaacatactactacaaggaatgaataaacctatcttcattttattgttgtggtatttgtacaattctacgaacattgatggatagctgcctcatcccaggcgagatctttaacaagtcaggtgactggagcaatgtagaaacagagattgaaattagcattttggcatttgactggttatgctttcttttaattctctcccataagttcctgaacacattgtctgttttcattttaagtgaatggaatgctaaagatgttatagaagaacctagaactacactctctggagacattactttcttttggacatttaggactattagccctaagttattgtaagcataaaacctgtcagcaagggaattcaacatagactgtgctttactgaagtaaatgcaaattgaaatatcctaagttgaatcatgaagggaatttgctgttcgctaaagtgagtccttttgtaagataaataactttcttgcaaaacaattaatactccccaaaggacgaatgcttttctgatttctttatgaacaaatctagatgtttacaaaaaaatgccaaatgaaacattctggtggatttactaataagcacttggattttctcttctgtgttccgttcattgctgtatgtccagcttcttaggaaaaagtctaggagagcagtatagctcaataagtattttgtaagggaatgaatatttcttcagtgcttgacctgagtctgaaacagggaatgtctcatttagagtgcacaaggaaagcaagggaaatgttagtctttaccggtaattctcaaattagcagttagaaccacttagttgggaggagactaatgacaaggggagggaaaaattctgcatgttacagatttaaaagcatattctctatcaattcatttacattaatgaaaatctggatttttttcatgagaaattatatatttctattagcccatattgattcagaaagaaggggaaaaacctgtagaaagccccatagaacttgtcataatagtctgggcagaagtacatgactgtcattccaaggcagtaacactttccataatttaataccctagtggataaacatttgaatttaaagtgtagatacattttggaaacactcaaccaactcaggaaacacatgtgctatggtgtcatcaggtcacacttcaggtggagctctgggaaattttttggaaaatactggcagaaataggttggaaggagggagagagaacacataaatccattagcaattgcatttatagctctttccatctgtcattttcaaagcatttttctaatattagctgctgaagttctaagtgcacatggctcatatccattgtctcatctcacttgataaaggtaaagaaccgaacgcaggaagcatttgtgacttattacttgtttgtgatccaggcagaattaaatgcaagaacttaagcttcgagttctcaatttctttccctatgttgaaaatccatgaggctaactacttcctaggaataattatttgtcttttaacaaaatcttcattcttattcttcatatagattagggagaaactttggatatgaaaacattggtgatgttacccattctaatataatctattacactgaagatttgattataccaactcaaggcaagcaaggtcaacttacagataaaataattatgtgatattggcaagatgtgattaattatatgaggtctacagttgccatcaaaacaatgcaaggcaatgaatttctaaggtattttagttttgtgtaagatttagtaatttaactaaactcatacctctctgtccctccagaatgtaagtgatactatatctgctcatggacaacacaagtggcctataacatttaacaaaattgcctaaagaaattaaaagccaataactgtaggatgaatatggaagtcctgaatagttccaccattaggtcagttaatttaaactttaaaatatttatatgtctcccaccagaacataagcttcttgaagaaacttgaaagaaacaattaggaaaatttcatggagcaaacttttccctagcccaggctatagttgcacaagagagttggggatctagaaacttctgtggctaatgtctgcaacacactgcgataatgaccaggagactaactagtcattcaagtgagaaaaagctttgacaagtccaagaaaaaaagagctcactgtcattcattctgggaaattaaaacaaaaacaaaaacttataaagaaattcaggctatatctcacgaggggaagaagaaactaaaaaagattaagagacaaagtgagcttatacacattagaataatatatgctcaaatctctggagaaactctattatatcacaattaatgcagaaactgcaatcaagccaggctaatttcaatagattccaagttttgaacagttcctaggctatccaagtgggaatttggccaggacgctggggttaataattcattttgaggagggctaattctttgggaagcagcccactctgcaggaggaaacatttggcccatatgagcaaattcgctctttgagatcaccatctattagctccacaagacaccatttttagggggagaagggggaagtaagttcactttctcatacatatagaaatatttatcatgttttcaataaatatatattaatgtcagagaaatggctcaagcatacacattctcaaggaataattttacagtaacttttaattaccatgatcttagtatcgcatcaccagacgagtattatggctaaaagtaggggctttggaatcagacggtcctggcttttaatcttggcttggcagattacttactgtaaaaccttgaaggagatactgaatcaccccaggacttgagttcttcgtttataaaataggaaaattaatggtacctacctcatagagttcttatgaggtttaaataagtcatgtattaattgaccaaatggatattgagtgccaggcactgttacaggagagaaaaatctctgacctcatggaatttatattctggcaaggagtgaaggtactaaatgaaaaatacagaatctctctgggggtaacaaacttcatgaagacaaacaaggcactatacagagatagaaaataactggggatgctgctcttttatgtagggtagccagggagagcattttgagaaggtgacatttgatcatagacaagtgtagtcagagccagctaggaaggcaggatggcaaggagcccagagccctactgcagagtgagaggggctcagtggaaggatgggggctggagaagtagctggtgccagaccatcctgggcctgtgggtcatgttaaaggatgtaagtactaacatggtgtctggcacatagtaattaagcacataataaatagtagctatttatttattcatactgggtaaatacagtcataaatcagaatcattccttgtttccattgctctgtcatgtaatgggagttttctacatcaatcctgtcatcctcacatagcgatatcctaacacattttaaacgctcatgatatcactagtatttgtaaatataaatattttgtgatgtgtggttattcagcatcttattttcctgttggtgggtcttaaaagtgattttttaaaagggtatgttaattgaatgaggtgagataggatgcaaaaaagaatcttcagctgggacacacatagagggaagatggattaggacagtgtcctttgcattttccccaagaacaccagaatgcaggtattttccttatactaagctgatttggaagaaagtctttaactgatcttcatgtctctaaattgactacaaattggccccagcagtcaccacctagcaagtacacaagacatcaaatggatcattcatacacttcccaaaaccggtatagctccatgtcaccaataaaacagattcttggcctgcactctaaggcctttcacaatatcccaaactatctttccaaatttatatcccactactctgcaacacaaatataaaatcctaaccaaaccacattgtcttctctattttattcctctattattgccaccaaaaccccttccatcttgcagatattcaaaatctcaccattctttctctcctcccctttttctatacactgtgtttcccagtccctctatacctctcctccccatgaattgggcatgaccatgcaactgatcactagacaaaggactgtgattaagggtatgtgtgctattttgggggctgaagaattcacttgctgctatgaactcccctagccctctctattgccgctgcaatcatggaggtacttgttaagagtgtggtgtcacaaagtggaagaaactttacatgctgagcttgtataaggaggacagccagcctcagagaatagcctgaactcaccactgattttgtgtgcccaagaaacaactcttttgtgttaagccactgaggtttttggtgctatttgtcgaagcagcgtaacaaatcctattctgattgatatacatttcttcaagatccagcttcttgatcactactttgaagtgattttttctttctctgtgcttctaaaaaaatcatacggagaaaattttctttagatgctggttagaaatttctttgtaggaagaatcagctctattgaaaaggatctttgataagcctgtgggttgaaaaataggggttgaaataaatcccccaggcctgtgtttctaatggcaggcaagtttcttgtcaaagcaggaagctactcagcctgaattgctgagaagctgtgttgagagctgcctaggagaagaggtggagaggcgattaaagttaagaggcgaggcctgggaagagattgcataaagggagtttttcaagtgatacgtgtgctatgtgatgtgacacttccccttgacactaaaagtcttcagcaaaactagagaattcacaaaatccttgatatgactggatttcttaaggaagctgatgaagtggctgaattttgcatcaaggctatgttggtttaaaagcaattcacttgtgcagtcaaaggaatcagctgatatctgggtcacacttcatttatattattcatttaggagagatatacattatagtacttgcattatagaaactggggggtaaagagtaaggttctcaataaaatgaaccatatttcacgcaactctttaatttgcatgtgcctagctcagaactgtatagttgaggatctcagtaaaaaagtatctattgaagagatgattgctgcagatcaaaaccagtcctcctcacttcgctttctcatcttgaaacgtaaaccggccatcatttagttctagtttatttggattttttgttaaagacatttgaagaatattctatgacattgcagtcatttttacttgttaagtggtagcaagtattttaagccttcatcagccacaaccttcctaatgggacattgttgtatttcttctcttagtttgcactcttaactgcatttaattatctgaattttctcaggatgaagaaaaagagctcccataaagggtgagaattgagaggaaatgtagataaaaatgaatttcactatctcacttccagtttatctactctgtcatcaacattaaagtcctgtttttgtctcttcagaaaaccacatgacatttgagaatcttctcctctactgcacaaatttcaaaaccatctggaacaccttccttccttccttctctccacctccctattcgtccatccttttcttcaaacacgaaagtgttttttccttatttggctcactcttcctatgtttctgagctcttacattctatcttaattctttagttatttaaaggtattgtttatatgagaacaaacttatacatacataggaaaatttgaaataaataatatttacagataaatcctctgtagtgtatatgaaaattaagaatcaacttttctgacttctaatttcaaatactaatgaaaagtaaaagggcaaagatcaaaccagtatatgtacacaggaggaagcactaatacaatacatataaatctacttttaaattagtatgtttgcattctcagtcaagaagactcatgtctgctccttgttagtaaattaaactcacaattacaatctttgaagatcttcccataatgaaaaacaatgtaaattgcagctcctcgtaacttaagacttgagaacaatgtctttttggctttttttttcttttcgcaaaaaaagtacagatataagaaaactatacagggcccttgtcttcaaatatttaatacttcatttactttttatagctggagaattctggattattgacactgactctgtaaataacctagctatatagacagtcacgtttacaaagattgaatgcctggttaaaatgctcaaatataatatagttttgtttaaaaatgcaaacatttggtcaggcgcggtggctcacgcttgtaatcccagcactttgggaggccaaggcgggaggatcatgaggtcaggagatccggaccatcctggctaacatggtgaaaccccgtctctactaaaaatacaaaaaaattagccaggcgtggtggcgggcgcctgtagtcccagctactcgggaggctgaggcaggagaatggcgtgaacccgggaggcggagcttgcagtgagccgagatcgcgccactgcactccagcctgggcgacagagcaagactccgtctcaaaaaaaaaaaaaagtgcaaacatttgtgtgtgtgtgtctcatgcacacgcacacacactctgcaggaaattaaagagcgccaatatttgaaaaatctccctacaagaaatcagagagtgcccacgatttgaaagaaaatctggatttcaacattatcctttgctgtacaaatcagtggaagtgtccacattactgtctccaacatagcacaaggaaagtgattcccctcccagacaagaggtttctgacacttgtctttattgccccatcataaattcataaagggatgtccgctgtaaccagttggcaagttcactgcataaacatcaacaccaatttaatgactgtgtacacatcgtaaactagagaatctttatacaaagaaatcagataaatcaaacatgagctgaggctaaggagaaagcaattaaagctttaggttaaggtggctgcgggagggcactgtgtcacgttagagcagagaacagaaaatgtgttaatacaactgcagtatgtataattaaattaattagtaatataaaatgtgtttaaagcaacatctcatcaacagattaatagataagaaacttttagaagttttaattttcccattgtatgtgttcaaagaataggaaaaaaaaaaccctctgaaatttcctaaggggttgataaaaataaaattgctgtggtggtgggcttgggggggtgggggatgtaaagtcgatttacctgcctctggctagtaacaggaaaaaggaataatcagaacataaaaacctgtttggccatatttcatctccttatagcatattgaaatgttttggcgccaactcatctcattctaatacctcgaaggctggtataaaacacctttaaggcacattgttttctgagcaattatttagagtcaatgtctaagaaatgcttaagcatcacctggtaatacaaattttaaagttatatttaaaacacccaaggaggtttttactgaacaaaaattagattgcctatatgccaaagctcctcatcaactgaaagctggaagctaaatttggccgtaagaaactggcttggaacttcagaagttctggggccaaattcagccctgtattacttgtatgccttgttacattaaaaaaaaaaaaaaaaaaaaaaaaaaagggctgttccagtgatagcaagcattccatttattcatctcaaaagcaataagatcctagaatggagccttcataacacaaaatgcttttaagttttccctgaggggaacacaatatacacaattcatgtaaaaagaagaaaaatgaaagctaagtatttcagttaagggtcagaaatcaatatttccttaacagcctaagcaacatgcattactcttaatacaaatactcagagactttacattcttcataaagggagattttcacataattggggttgaaagtggcagaatatgctctcccaacttagtttctattgctgcaaaatggaaaagaatatatttggacagcatttcactgatccctgtcatcctcggttaaaacttcttacctaaatgtccaagtgtggagcaacacgtaactaaattttaatacatctcaatggaatatgataaagacattgcaatatcaataggagaacaatatagtaacagaaactataaatgtaaaactaactttattgaagaaatgagaatatggtatttttcaggtggcaaaattttttcatgatgttccgttatgctgtcaataaaaagttttaaaaaagaaaaacttctgcctgagtagcacaaaagtaagttatgataagatgtagtaggaagagaatgaaccttaagagataaagtgtaactaaaaggactgagtttaaaaaaacaaacatcctgactagctggtgagcattaacattagtcctccttctgttctccagaatggagccagagtgatccctgcaaaggacccgtgtgattttgtcactctactgcttggcatgcttcagtggctttccattattttcaggctgaagacgaaaatgtttatcatggccttcaaggtacccaatgatctggtctcgaactcctgacctcaagtgatccgcccaccttggcctcccaaagtgctgggattacaggtgtgagccaccgcacctggccaatagaaactatttttaaaaattcatttatgtgtcttatgccttttaaaatattttttgtcctgttttctccttctttcaatagtgtactctgatatgattcaaaggaaccccagggaccaacacctctcctggtttccaaaagaccttaattttactacagtttaagattcaagtgtataacaaattctttttttctaaagcagaatttagaggaatcagttgtgacaattcatagagatacacttttttttttctgtgcatgaaaagcagtaaagccccgactcctgattttgaaaccaatttctcatatcaaaagtctacacatctgttgaaactgcctctattgcttaggactaagaaacaatttctttgtatgggctgactgaacaactatcttttaaatctcttaagtatgtactagaattagtctgtgtttgcatagacatcttttacttgtcgatatacaccaacacagctgtggaagaaagactaagctttagtttccacttggccatcggaaactaaagtcacttaatctctctaagcctcagtttgctcatctataaaataggacaataatacctgctttacaggtatttgggaggattaagtaagaaaatgatagaatcatgctggataagctgtagagcatttacaaatagaaaacataatcaagattccacttagcttgaggattcagacacagagttttgcagagtggccaagtcacaaaagggctcttcaaaggcttctactctctggtgtgacactggcacaacacctattgccccggtagaaagacctttatttcaaaatgtttcactaggaaacagttaaaagctgttctttggttaagcgcactgactcttatttggatgctgctgcctctttaaagcttagatctgcattcttctaatggagaaaaggagagtaggcataaaactatagaataaagagcctggaacttagtaggtgttataaaacattggtttaaaaaagaaaacatgagtgaataaacccaaagcgttcatctattttaaattatccgaattgccatggtaaaatacaagttgtaattagaagaatcaggtttggtgctttgcacataataagagttgaaaaaataaagaggatgactggagtaatgacgttcaaataagaagttaaaatattaacactaaaaaactgtaactgaacttttaattaaaaaaaccctaaaaactaatgacattgttttcttcttatttaaaaaaaaaagccagtattccacttgaaatgttcgtgagatatacaaatccactgatttccaaaattaaccttatgatatttaaagatgatatatgccttgttgtctatggatacctgccagaacttgtacttacgtatttctaaacacttaattcagcaatatttcacatcaatttccccctcgatttttctagctatcatgccttgagagcagttcctatctttgaccttgaaaactctcaataaaaatcagtcacatttccatttcctagaaattcgaagagtgtcaccaaactttcaggtacagataaattcttgtctggttatcctgtattgtgaaatgccagctcttcattatttcagaacattctatatcagggctgatattgaatctataattttgtgttttaaaacaccaaacatcatagtgaaattcaaaaaatgaatttcagaattctgagtgttcatatttcaagctcctacatagttcgtttattttttctttccatcgagccacagaagttgaccccagtaagaccattaagtccactgatttcattagtaatatttttgttcacactccaaaaatcaaattgttcatattccaaaaattaaataatttggtttatcaacatttcaatgattttccatattctcccaaattatttgagagctatgacataccacgttaacatttacatatgaaaaacagaagcaaaaaagcaattttcctaatagaaggcatttaatcacgttgaaataagatcttaccttacagggctgcccctcagcccaccttatactttctggatgtttaagtctgtggctttgacttacatgggttaacgtcctctgtaagctaaatccagtatcagatggatatggcatgaggaaccagccagcatgaggaaccaggtcctactgttaaatctgcgtgccatgttcagttgagaacaaaacagtctttccctagtctctggtttctctggcgttttggggtgagaaaataactgagtttaggatagacacactcatcagaattgttcttgaaaccctttgcatttcaatcagtgcaaaatgctttttaaatattcctgctaacacgtgcccaagagagaagagtcggtctcatattttcccaaagatcaaaatatcaagagatgggaaatccctccatagaaaaccttattatcaaggctaaggcaagcacctggggaattaatagctgacatacctcattttaaacacctaccatatgttcatggaaaatatagccacgttacttatcactttctgttttcctttcattggtttatgttttgccttgaataaaaactgcatgaaaacatagtcttatgttaccaggtatgtatctcctccgtggaatagctcaataacatttttagtgttttatttatgcaagcaaaaatgctcctcaaatcagtgcagcttgaactgcttgaagaatgctttttgaattccagaatactgaagttttttctaacatcactcaggtacagatacttcccaaaaggcctgtgactgccttttcccctttttgttttttaaatcccatatctgtgtttcagttttctttaaatttattcatagtagaatcatgaaacttcttaaggccaggcggtgggtttataaaaaataagggtttttttttttttttcagagttccatgaatttactgaacgtctaccatgtgctaagcgctcctcacatacacctgcatcaatttttcccttcttgacaacagtctgagaaggtaagtgatgtgcttaggtcacaaagctagtgagtggtggagctgggaatctaacgaggttttggtttttgtttttacttccaactgtttgttgttttggctggcacacaatagacgatgttcatgtgcacagccactcccagggtgagtccaaggtgagatgacattaagaaagcaaatgtgtaggcaggaggaataatttcaagagatctatcgtacagcatggtgactacagtcaaaaacaatgtatcgtatacttgaaaattgctgagagcaaattttaagaattatcaccacaataaaaataaagtatgtgagggaatgcatatattaattggtgggtttagccattccacaatgtatatgtatttcaaaacatgatgtacactgtaaatatatacaatttttatttgtcaattacaaaataaacaattttttaaagtttctaccaacactttataagtaagggaaattaaaaggaaaagacaagtaattataaagagttttattttatttttttttgagacagagtctcgctctgtcacccaggctggagtgcagtggcgcgatctcggctccctgcaacctccgcctctcgggttcaagcaactctcctgcctcatcctcccacatagctgggattacaggcggccaccaccatgcccagctaattttttgtatttttagtagagacggggtttcaccatgttggccaggctggtctcgaactcctgaccttgtgattcacccgccttggcctcccaaagtgctgggattacaggcgtgagccaccgcgcctggcctataaagagatttttttaaaaagaaagcaaatggaaatgtaagtgggtaagagtggcttcttctgggcagaactatatccatatgtatattatattatattattatatgtatataattatattattatatgtatacttatacatatatatcattggaaacatcagttcttaaatactatgacacaccacaactgacagagactgaaggcacaggtgctatatctctgtgcctaggaacctagacaaatagcagcagatctaagggttgatactgaattgcttatacatttgcagaaaaaaattaacagattaatagaaaatgatcatttttgtttgttttctaatatgatcaatggagacatgcaattcaatatttactatccacctactatgggcaaggactgtaaagaggagtaaaacacaatccctgccttcgaaaacttaaaaactcaaataggggccaggcgcaggggctcacgcctgtaatcccagcactttgggatgccaaggcaggcggatcacctgaagtcgggagttcgagaccagcctgaccaacatggagaaaccccatctctactaaaaatacaaaaaaattagctgggcatggtggcgcatgcctctaatcccagctactcaggaggctgaggcaggagaatcgtttgaacctgggaggtggaggttgcagtgagccacgattgtgggattgcactccagcctggacaacaagagcaaaactccatctcaaaaaacaaaacaaaacaaaacaaaaaattcaggggaggtgtggtaagtgtatatatatataacaattcaataataaaattttagaaccaaaattcagttgaggaaaaacacacttttcaagaatgttttatatacttatttaaaaccaggcttctcatagcatcaatattaaagaaaaggatttaaatcaaatccatgaaatacatagcaagaaatgagacacactgaaacacaaacttaaaaaaaatcttgttgattggaaggaatggggaagtaaagtagcaaagtgttgaatagcatagtttttgacatcaaagagaatcaagttcaagctcccagttgaatttactattcatgtgatcttgggtgagtccagggatcatcacctactagaaggaataataatgcctacagcacagagttgtcatattaaagaagataattcctgtagtaaagtatttaatagcatagtgcccaacacacagtcaactaataatattaataaatatcaataaatattaacttagccacaaaaggtccaatgtgttagttaaactacaacagctgacacagaaagcaggagccttttatttacagaactccctatctctaattcctaaagataaaacttagaaaaggctggttgatctttatcttcttgagtgttttctctcaataagggctgtagtgatcacaggccaccacacagtgaagggcattcagcatcaaaagtgtaaccagaggagagcccaggcaaacaacctgaattccactccatttactgcttgctgagcaactactatacacaaaataccctgcttaggatctaaaattacccaattgaaaactttccttgctagccctctagaaaggcacatgttctacaaggacataactttaacctgtgacaagttttgataagcagttattttctggtgaaaccatggattaaatgtacctcctctgcatttggtaagatgatacattataaacaaaaatttcttaacaattaatccatgtttcttctcaacaatacaaatttgtttctggtcttcaggccaattaatttccttggcatttacaacaacaacaataacaataaggattaaccttttgttaagtgcacagtatgtgccagagactgtgtgttaggtgatttacatttttgctaatccctagagcaatttacagatgcagaatctgagatgttaaatgacctgcctgaggtaacactgtcagtagtagcagaatccagatgaattgaatgcaggccagcctggctccaggatctgtgctcttatcgctgtaccacactggtattgtgctacaggcactgaagtgtgctttttattgtatccttgcttcttacatggattgttttattttaaaatgctaagaaaatgtactaattacccaaataatgaaggtttactgtagaaaagttggaaaagaaggaagagcaaaaagaaaacaaattaagtctcaaataatctaccatccagaaagggctagtattttgtgtctttacctcccaaaactttttctttccatacttatttgaatttgtatcttttacaaaaaaatcggctcatactgcatatactcttttctaacttgcttcttaaaaagttaataaacatttttccatatcaataaaaatacatctctattacattttgatggctgcataatattccacaatatggatgcaccatgatttgtcaaatttgtttccagttactagactgactgctttcaatgttatggctaaaataaacatcataatcaatatctacttacatttttgtttattagatcattaacttttaagaaaattactggaggtaaaaataaagggccaaaagtatgcatttttttaaagatgtttaattctttggaaaggctgtacaaactgagaatccctctgaaaatctgaaacttgaactgctccacaatttgaaactttttgagcactgacatgatgctacaaatgaaaaattccacagctgaccttatgtgacaggtctcagtcaaaacacagtgaaaattttgttttgtacataaaattatttaaaacattgtataaaattaccttcaggatatttgaataaagtgtctatgaaacacaaataaatttcatttttagatttgggtaccatccccaagaatacatatattacatatatgcatatattcaaaatctgaaaaattttgaaatgctaggcacttctggtcccaagcatttcagatgagagatactccatgtaaacactcttcagcataatatgaaagtgtccctctccacatctttgccaacattggtgctttggcgtttgccaatatgataggtgaaaatgacatcgtattttagtttttatttccttaagtacaagttgggataaacttttttttcatggttactgatcacttgcatttttcactaatgaattacctagtggagtcatgtcagacgcatgtttaatttgattgcatacactcagcaacataataacctgtatgtaattaaaattacactttgcatacatttccattattatatataatatataaaaatatatataatatatatgaattacattttacatttattatataaatatatatataacatatatatattactctaaaggattatataaaaaccccatacaatatagatattattagaaatttaggagatttttccttaactttgaaaattctccatttgtcagtttatataataaatatatataataacacatatatatattactctaaaggattatataaaaaccccatacaatatagatattattagaaatttaggagatttttccttaactttgaaaattctccatttgtcattttatactctaattcagaatatttatgaaaaagatatgccttactaagttttacaaaaagatgtgcctctattgtattaaactcccaattcatttttggggtacttttttctaacttatttgtaagagttctttacatatcaaaaatattaacccctacttagtcacatgtttattgtgaataattcccctcagtttgtcatttttattttaactttgtttatgatacttcttgccatacagaaaatttaactttttaatagttatatatatctgtgtttttcatccctgacatcatgctctgaaagactgctatattagttcgttttcacgctgctaataaagacatacccaagactgggcagtttacaaaagaaagaggtttaattggaattatagttccacatggctggggaggcctcacaatcatggtggaaggcaaggaggagcaagtcacctcttacatggatggcagcaagcaaagagagcttgtgcaggaaaactcccccttataataaccatcagatcttgtgagacttactatcatgggaaacacctgcccccatgattcaattacttcccactgggtccctcccacaacatgtgggaattcaagatgagatttgggtggggacacagccaacccataacaatttcttaaacttaaaattccataactaatatattatatcctactaattttgttcttttatttcttacactaaaatttttaattcattaggaatcaaatgacataatccattttgttttctcccatttgaaatgtcatctttattttcaaattaattttatgtaaattttggtatgtgcctatactgtctcttctgttccactgacaggcaccttcatttcagtgcctgtttaaagctatcttaattaccatagctttataatatgtattaattaaagtaggacaaatatcttaactgctcttttaaaaatcttaggctacattagcacatttattcttcaaagtaaaacttagagtactttttgtcaggcttctcctcaaaatcttcttttaagattctgatgtgtagattgagaaaaattgtaatctttacaatatagcccttcatttttttcaagttttcttttatgttccacaatttcatttgtaatttactccaaatagaaaatgagcattcccttttaaaattatttgatattatacactttattgtgattttatctttttattacattcttttattgctgattaaaaaagctattgatacttgcatattgattttgtaacctaataaactcattgttttgagtagtttttgtttgattctttttatttcattttgttctttgttcaggtaggcaattataccatttactagttattttaattttttctcctttctggtacttacacttccaattttattttttatttttttcctttcctgcattgactagaatttccagataattttgagaaaagctgagaaactgtagctccttatttatagggagactaggggttccttatccgatatgatactaggtattatttaaggtatacagtgtgaggctttgatatgtgagtgggcgtgtgtgtgtgcgtgcttgcatgtgtgcatgcatggtgagaacatttaagatctactctgtgatggttaattctaggtgtcaaattgactgggttaaggaatgcccagatagctggtaatacattatttctgggtatggttgtaagggtagacattagcatttgaatcagtcaactgagtaaaggaattccaccctcatcaatgtgagctgtcatcatcccatctgttgagggccctgacagaatgaaaaggcagagaatgggcaaattctccattcttgagctgggacatcattttctcctgaccttgtatatcagaactgctgattcttgggccttcaaactccaagacttacaccaatcccccaaaacccccaagttccagttctcaggccttacatgttgaactgggagttacaccatgggctcccctggttctccggcctttggaattgaactgaattatgccatcactttcctgtttctccaacttgcagatggtatatcatggggcttctcagcctccataactgcacaagccaattcacacaataaatttcctcctatatatatatctctctatatcctattggttctgtttctctggagaatcctgactgatacatactctcttagtgaatttcaagtgtacaatacaggattactaactacagttaccatgctgtacattagatctccaaacttactcattcagcataactgaaacattgtacccatttctcccagcccatggcaatcactaatctaccctctgcttctaggagtttaactcttttagtatccacatatgagaccatgcaatatttgtttttctgtacttggcttatttcacctagcataatgtcttccagcttcatccatgttgtcacaaatgacaggattttcttcttttttagtgctgattaatacacacattgtaagtttgtatgtacaatcattttctttattcatctgtcaatagatacttagtttgattccacatcttggccattgtgaataatgctgcaatgaacatgggaatgcagatatttctttgacatactgatttcatttcctttggatatattcccagaaatgagattgctgtatcacatgatagttctatttttaatttttctgaggaaccttcatactattttccataatggctataccaatttacattcccaccaacattgtgtcagggctcccttttctccacatctttgtcatcccttaactcttctcttttgataatagctgtcctaacaggtgtgaggtagtatctcattgtggttttgatttacatttgcctgatgattagtgacactgagaattttttcatataccaattggccatttgtatgtcttctttggaaaaatgtctattccagtttttgcccatttttctattgggttatgtgttttcttgctattgagttgtttgagttccttaaacacttcggatattatctcatcagctgtgtggtttgcagatattttctccaattcctataggctgtatattcactctgttgattgtttcctttgctatacagaacctgtttagtttgatgcaattccatctgtctatttttgcttttggtccttatgttttggagtcatatccaaaaaaatcattgtccagaccaatgtcaaaaagatctttccctatcttttcttctagtagttttacagtttcagctctaatgtttaagtatttaattcatttttagctgctttttgtatatgttatgagacatagttcaatttcacttttgtgcatctggagttcagtttttgcaacaccatttattgaagacactatattttcctcattgtgtgttcttgcacccttgttgaggattaattgactgtaagtgcatagatttatttctaggttctctattctatttcattagtctatatgtctgtttttgtgccagtattatactgttttgattactatagctttgtagtatatttttaaaacagtcaatatggtggctccagctttgttcttcttgctccatattgctttggctatttggaatcttttgtggtaccatataattttaggattgttttttctatttctaagaaaaataacattggaattttgataaggattgcaatgaatccatggattgctttaggtagtatggacattttaacaatattaatacttccaatccatgaacacagtatatcttcccatttatttgtgattttgtcaacttctttcatccatgttctacagttttttagtgtacagatcctttgcctacttggtttatttttttcctaagtatttaattgttttagatgctatgggattgttttcttaatttctttctctgttccttgttaatatatagaaacacaactgatttttgtatgttgattttgcattctgcaactttactgaatttgtttactagttctaaaagtttcttggtggtgttttcgatatataagatcacaagttttgtacatataagattatgtcatctacagagaaatttttacttctttctttttgatttgaatctcttttatttctttttcttgcctaattgctctggctaagatttccagtactaggttgaatagaagtggtgggagtgagtttcttgtcttgccctaatcttggaggaaaagcttttaacttttcactgttgagtattatgttagctataagcttgtcatatatggcctttattatgtcaacatatgttccttcaaatacttcttctttatctactgagatgatcatatgatttttattcttcattctgttaatgttgtatgtcacatttattgatttacatgtgttgaaccatccttgcatgccaaggataaatcccacttgatcaggatgtgatcctttcaatgtgctgttcaatttagactatttgtattttactgagggatttttgcatctgtgttcaccaggcatattagcttgtaatttttttcttgcaatttccttgtctggctttggtatcagggtaatgttgacttcataagatgagtttggaagtgttcccttctcttccattttttgcaaaagtttgagaaggactggtgttaattcttccttaagtgtttactagaattcaccagtgaagcccttaggtcctagacttttcttgttcagaagtttttaatgactgattcaatctccttaccggttatttgtctgttcaggttttctacctcttcatggttcactcttggtaggttatatgtttctaggaattcatctctttcttttaggttatttaatttattggcacaaaattgctcatagcagtctcttataatcttttgtatttctgtggtatcagttgcaatgtctcctctttcacttataattttatttacttgagtcttttcttagtctagctgaaggtttgtcaattttgttccttttcaaaaaacctacccttagtttaattgaacttttctattatttttcttcagttgagagaatttgtgatttttttccctcttatactcttgactatcacttttattttatttgtacttgatctttcttaagtaagaatacctatctgttggtcctccattctctgttgttcatatcatcactttccttctccttttctttctatctttctatccttctctggaccatcatgggagatttattcaaatgtcttcttccatcacgttctgattttctacaggatcagttctgttcttgactgttctcaatgagtattttaatcttgctcttgtgcctttagcttccttacaatcttctttcatcttcttctgtttgctttttatcttcttctgtcctttacctcatcattttactttctatttcatatttttgccttctgatagaggccttgttttcttgtaatacagtattctgatgatcttttctggatcttgaattggagcatcctcaggtgtgttatttgctttattctgattagatgtagcacttagaaaactgaaattcacagtccgcactgccaatattttttcccttctatgtcccacttcccacactggctttcttataaggattgtatttattagaatgccctgcaccactgttaacatccccctactttctgttcatttgcttcctgagaatttcaatatctgtttgttatagaaaggtcacagttgaagtgtcgggaaaatgataatctctcaaagcagttcccaagagccagagaggggtttctgctcagatttctggttggcacaattcctggttcactaggtcagcaggcagatggtgacagagttgtgaagcatattcttacctctcaccatactaattcttttattcaataaagaggtatggtatgctatgagtggaagctctacatgccttataaataggacctatttctcccagattctattggtattagtttctagcgccactgtaattttttattatttcttgtgttttcatgggcattgagagataaattatactggaaactgctagtcagatcaattttgatatggttcttgttgacctaggttttcacataattttatttgggggatgatcaagtcctccttttcattagcaaaaattaaccacttttgtaatcttaggtttcatacctctccctagttaaacataatcttgccttctgtattcagctgtagcatccaggttagcctttatttagccaaagtctttcagctccgaactttctctttagtactctgctttcagatgctgaaactgggatactacaaactgcatttcgcctttgccccaggcttcctgttagacactgcaattagggagcactagaggaagactggaaggcaggaggagggaaaaagaacttgctccttcctgtgctcttaatgttccacccacattgcctcagcaatggtactttactctggcagctacacagttggttccggcttccagcttccttcagtgctcccagagtcaacttcattactctcacgggtatcacaagtagtctggcagttctctcctcagagatctgaggcccagctcctgaggtatcaatcccagcactagctgggtggcttcctttctcagaggaccgagtcccaactccacaaggctcctcctctggccttctaggatctgctgacccccaccttttccttttgtcctctcagccctagagaaggtaacggctttcaaaagcgttatcttgtttccattgtgttctgttttgctttttaagattactaatgtccctttcaccaaatgcctatgttgaatgctctctgtgaaaataactagtgtgatttctgttttctgactggactgtaactattacacaggatgctttcacaaaatatctgtgagcataaacatttcaggaagccaggccaaggggtgtgtggaaggtatgcttggagatatgcttgatgatggtaaagtgtgtaccccaagatttagataagaaaataaaactttctggactacagtactgccagatcactcagtgtggggtggggtgtgtgtggtagagagtacacacaaggaaatgggagatggtcaggtgccacggctcacagctataatcccagaactttgggaggccaaggcgggtggatcactcaaatccaggagtttgagatgagcctgggcaacatggcaaaaccctgtctctacaaaaagtacaaaaattagccaggcttggtggtacatgcctgtagtcgcagctacttgggaggctaaggcaagaggatcatttgaacctggtatgcagaggttgcagtgagccaagattgtgcctctgcactccagtgtgggcaacggagcaagaccctgtctcaaaaaaaaaaaaaaaaaaaaaaattgtagatttcaaaggtaaacttctaaaacttagaaattttacctgcagcaagcccttcttggggtgaaatgacactggttgtaaacttttcaaagggaagtcagaatcaggttggagttcttaagaagagcagtgtctttcatgggctggggtgaaattatgataaaatgaactggctaaataaatggtcactgaaaatgagaccaactctatcataagacacttaataacatcataacactttgatggcaaagaaaaggcatgtcagctgaggggctgaaagtcccttagttccttttctgttcacagggatcatcttcatctgatctaaatgaatctcagctatgaccagttttttttttttttaaacacttgattcagtcaccaaactgaccactgggattaaatcaaagaagacgtaacactcagtttcaatgttgagaatactgtttgcattgaacatcagatctatacaaaattttggttcagctcttttacaatttttgataggtataatattttactttagaaatgctcattcatgtcactggaacaacattttagactcttaaaaatgccacagagttgcagttatgcaggatgaaaaagtctagagatctaatgaggactatagttaatcatgttggattgtatactggaaatttgccaggagtagatttgaggttctcttaccacaaaaacaaagcaaaaataagaaaagaaaggcaactatatgagatgatggatataacaatttgcttgactgcactaatcactatatatatgtgtatcaaaacatcatgtcatataccttgtatataataaagctttttttaaaggccaaatacttattattatccaaatgagtcacatcagattcttttttgaggggaggaaactttatcctttggggaaccccaaatcagtatgttttccttgtttatctatttcttaattgtattccaaatacgagttcagagacaatgaatgttagctgacattcctgtcacttggcttgataaacccttcagacagcaaaaatattgttatttcttacaagggtcctctctagacaattgctatgactttacttgttataatagataacagtcctgaggaaaatagtttgccttggcccaggatagaataccttaaggcacactgcataagtcattacatagtggatttgtagaaagaaggaaaagatttattaaagcagaaatttacaataaatacccattagctatggaaatatcttaaaacaataaccatcaaccattctttcataggaagataactcttttctgtctcttcaattcaatgagatgttcaagatttggcagttcccccaaacaataatttgcattcatctaagaatttctgaagcattttaagagggttaattcattatcttttataatataaccaaaacttacttattactagatcatcttatcccttctgcatggaacaagacacgaaagtaacatacagaggaaaatcttgcattaagaaatgaaaaaaggctagcaagaaaaaaggatggggtcctgttttgtagatattgagatccaccagtgattacaaagacagccagcttctataaacacatctttaattaatcctttaactgtcagacttcaaaacaccaccattaaaataatatttcttcttatcttcagtgcttgacatttccttcatttgctgactcattaaccatcagaaaacatgctaaacacaaagagtcatgttctttgagagttaacaagtcaggacagaactagagaggttaagtgaccagttagacaatttggaggaagaaccaaactaaagctcatggttttcctgtaaattttcagcccagtgggatttctgcttgcactgccactgcccagctgccaccttatcatgcaagtgacctaactctgtcatttatatgctcatgacagtattcgcgtttgaaaatacaagaggtttaggtttggtgtaggttcggcttgggagggtagtaatatttgccttcaggacttcttctttcagcttcaattcccttgcatactcgtgtggacttctagtcacacagggtcagctcggactacaactgccttaggcccagatatggtctctgcccaaggttcctttacttctcccaagccatcaaaactcttccctgagatcttctctttgaaaatgaatgttaacattggtccaatcacataaatatagctactattacaactctagcagtgatactgcacttctattactacgggctaactcatgtttacagaactatgtgccacatttcacataatggaatagcttaattgttggtttaccagcacttatttggcagttgccagatgtttgttgaccattacatgacagttgtttctgtagtgtaagtacagtgtagcaacatgccagcttacttgttggtagtccccattaggctgtaggtcacttgaagtgggggcattgtatcttcatttggaagcagttttgtttgtttgtttgtttgtttgttttttgagacagagtctcactctgtcgcccaggctggagtgcagtggcacaatctcggctaactgcaagctccgcctcccgggttcatgccattctcctgcctcagcctcccaagtagctgggactacaggcgcccgccaccacgcccagctaaattttttgtatttttagtagagacagggtttcaccatgttagccaggatggtcttgatctcctgacctcgtgacccgcccacctcggcctcccaaagtgctgggattacaggcatgagccaccgcgcccggcctggaagcagttatttttgtacacactccccaaagaaaacagtttgatttaaagtttaaatgtattgattcaatgagtaagtgaatccacactttgttgaatctgcagaaaaaaaaaaaactttgtctaatattaaatcagccaatagagctagtgtggaaattataaatttgttactattaaaataaatgataattttgagtgactaagctgtgaatggagtctcttgttcacttaaatcattttcaaagtacttccttttggcatatctggaaacattttatttgaaattattattttggtttgaatttttacctatcaaaagaactagtcaaaaaagaaagatgaaagaaggcactaagtatatacagtttattggtatagtttagtgggctttcttttttttttacagctttaagatgtaattcacataacatacaatggaccaatttaaagtgcacgatttgatgtacttaagtatattgtagattttaaaaagaagcaaaaacttaacatttttagtacaataatttcaagtgtgagtgccagaaagggggatagggcttttcaggaaaaaaaaaagactgatattgagagctattagataaattttcttctgagggaggatttgaacctctgaaaatctaggaaatgtaaatccaaaatgtgctaaacacaagactattaggctttttcctgaaatgaataaatgaatgtgagcttttgcctctttattttctgtgagtcaagggcatgtataactatttttcagctttacctcatgaaagctctgagctttcccttcatgttaaaatatattatttaacatttgagtatgtcaacaccacattaggcactttaaagtacagaattagccatgcttcctactcaggggacttgtctactaagcatcagactaaagcaaaatgctctagaattccctcacatcaagcaatccatagagtgatattttcccttaattcttctgtaaaatcaatgagatttttctctcttttttttttttgtgcaaactcaaaggaacactctttgatttaacatatacctttagaagttctgtttggcacattccacatcttattcttttatcatgggacagaatcagtgactacatctaaaattaggcctattaaatgtggtttctgtcacaaagcaaaaggagttcccattttcactaattctgtcatcacctacattattgtaggtgggatatttaaacaaatgagagcttatttctctcatgcatcttcatagggtacactaacttaataaggttgatggtataatgcagtgagagagcctgaagaaaataaatacaaaatgctttgatctaggcatacttttgcagtgtaaaaatagttggaagtaaaatttttaattatgctatagtctaggatgctttgtgagcattagaaatataaggcaagtacaaagtattaactcttaaagctatcaggctacactctttaatctaagatgattaaaagtacatattaaagtgttaattttctttttttttttcttttttttttttttttttttttgagacggagtctcgctctgtcgcccaggctggagtgcagtggcgggatctcggctcactgcaagctccgcctcccgggttcacgccattctcctgcctcagcctcccaagtagctgggactacaggcgcctgccactacgcccggctaattttttgtatttttagtagagacggggtttcaccgttttagccaggatggtctcgatctcctgacctcgtgatccgcccgcctcggcctcccaaagtgctgggattacaggcggtgagccaccgcgcccggcctaaagtgttaattttcaatcgaataacttgtttagtcactgaattgctagtcggcttcatttatagttttaccagaggctccttaaactttttggtctgccagattaactctgcttggataaatatactataatcaactagattaattagtcaaattagcttagtatttcttcctcaatacttagaagttgaaaagttcataatgttgaaattaataattcagcatcagttgctaaagtttttttaagactaaatgtaatagtgacaagtgttacaaattcagaaatattgtaattaagcaagcagatgtacattttgaaatagtgcctcaatgaatattaaaacatcctgaataaattcttgctagagtttaatttggtgatataaattgttgaaagaaataataaaattattagcatacagtgttttctaaaagatctcattgtcatttactgtaaatggtgttgtcaacatgctagttcatagatatatttgggaaaacttggcccacatggttctctcatcgaatctagggtgttatttcatggacaaaaagatcttatcttaagatattaggccttgaaactgggtctttgagttttttctaccagagagtgtagtagtttctcagagcaaatactcgtgaaattagataatttcattttgcaaacaatctggaaaggatttggagaatgaggaagagggggagagaaggggggcgatgagaggaatctactcaggttttctcgcacggattttgaattttgccttgagatatttagaattgaaataatcaaaaggtaatcatattacctaactttggatagaaaacataaacgaatcccaaatttctaatacttacccttcctgctaaaactatgagtcttcctaatggagaacaaataatgaaaagttaaataccctgattccaccactaattcttttaaattatctgtagctgaggattgttacacagtcattttatcttcaaaaaacggcagcaaaatgtcaatgaataggtagtaggaggagttctggaaggatgagcacaccaataaaattattaaaaaccagaggtaagtgaattattacctggatttcctttcatatgattggaaagaaacccatgagagtttaattctagaatctttttctattttataaatatttaaatgaggcaaaaagaaacttctagaattccggtatttaactaattcttctactgtactttcatttaaaaaaagtattaatccacttgtcaaagtctcctggggcatcatatcatttcttataattgtcctttatattctaaatggtagatggatctcttagtatatttcttcaaggtgaagaaaataaaatggaagcatttgtttttcaaccaaaagataactatcagaggaatgatgcaaagtttgcaatctgatggtttttaaggataattttaagctcgtcttaatctttgagactggttacctcatttgtaaataaggaatatcacctcctagatccctaacagaaaatatttgtatattaaaatataaaggctgtgtgtatgtgctgcactatcaggcacaacagtttggggttaagcattttcagcaatcttaaaagtcaaactcatgtaatccattataactgaatctacaaatgtcttcaggtaaattcagaagactgaagcaaaagatttttagcccaaaaggtaccttctactgaggttcttacagaatgtcagagtgctttaaattatggtactaatagagagagattacatatatataaatgtagacatttttacgaacaaaatcttacaatgatagtcttgttaccaggatcaaacagaagctcaaaccagctacctccataaggtgtgaagttgagatgattttcagggtcaataaagccaaagtaattttagattgaacgctttgttttccaaaagaaaaaaaaagtatgcacatctctattcatgatgtgtgtgtgggtggtatagttttgagaacttgaggagagtggtgcttggtataacctaggcagcaagggaaagcatttaaaaatactgtcaacgattctggcaggaaagactgtataaatatactgtagactcaaacataagtgagctggttaaaaaaagaaaagaaactgcaaaggaaaacttcaaaacttctacccccatgatgaaataaattacataaaggaggaagttatcaagggttttcatacccaccatatacctaatttcaaaagcctagttcttaaggaattttcttttcaaatctgaggattcagtattcagccaatataattggtcggatagtcttagcatattttgtgaaatcatttataagactaccaaatgtcttgggaacttttccctctaatcactcctgaatccgtccaaattggttttaaattattcctttcgtaatggtaaatttttattacaaacatgttttttactccaatttaaacacagatatgtcagtttgaagttgaaataattagatcctacatggtttttcatgcagcacattattatattatatcaaaaatcctatcccatcatggaaaagatgtgaaaggtttatataaattccaagttaatttatttcattaaatggcttatactgtgcatgtaggtgtgcatttattttcaagcacaaacatgcaaatacatagaaccatgaattatattccacagcatcccttttaaagtgcgttttttcttttaaaaatctttacatgaataatatccaccatcatggacgttgaacactgatgattctggctaacgcttttatcctttgcttgaaattacaggatcagtctagccagaatttatgagaaccagacctcagacctcacatagctcacatatgagaccattaggcatctaactacctctgaacaatttcaatgcattatctcgccttttccctggggcacaaacttcactcgtccatacttttaatatattttgtctgcatgaagcagatcgagttattacatgccagtggatcacaacttacagaaatttcattgcttcccaacgatgcaacaaacgtctctgttctcctccctgatatatggctgaagggaaatggtcaatactgcaaatgtctgtaaattatctggcggttttatgtaaagtctatttgatatttttacttaaacactttaaacattttcatgcattcccacccatagacacttaaccaaggaaggccatatccatgcactttttttttctaattgcatgccacttcaaatgaactatgaaagtgcctagataaatgaaaaccacctaacttttactttctccagtacattcctgattgaacatctcttgtttttacttacattttgatttgcaggtttgtaagtcttacaagccagaaatttatttgttcttcaaaaaagaaatttagtgatctaagatttaaaaattaattgatctctgaactctcctaaaccttttacctggattaatggcaaagccattacgttcttttctttcattagggtttttttttttcttcagcaaggctgaacaggaaacaagggtgatcctatcctgtccctagaggcagttcatcagctagctcagtttacagctactaaaaaaaaaaaaaaaaaaaaaaaaacaaagaaaagaaaagaaagaaagaaagaaagaaagaaaaaaaacctagaggtaagtagcactcagaaatgttgtgctttatcatgaggaactattgcggtaagtgagcacacaataggcatttttcttgttcgacttgaatctttgtattattatttttcattatccattctgaagttaggtttctcagacttctgggctagttaaccatttcctctagtctgagatatatatatatatatatatatatatatatatatatatatatatatgtatatatatatacatatgtgtatatatatacacacacacacacatatatatatacacacacatatatatatatatatttttaaatattggtgaataattatgctacttaggttttcccaataaaataattggtaaaggaaaaccaagctactgttatctaagacaattttctcatttagttccaaactaaaacaaacagcaatgaaaggtcattagtctcacagactaaaattgttttgatgaaggccagctttccattctgttgacaagcgtctcaattcttttcaacagctctaggtgttcacactggaagaatgtggggcagctttggggcagtcatcagcctcagggaaccaatggctcctggtgacaatttgcagagctgccactagtcaaactgttcctcctcccctattttttttatcgagattgggaaaattaataatggaaatttgttcttagtggcagatttgaatacaaacactgcttgaatttctgctgctgtatattgttgtttagcaataatgaagtctcatcataattacgtgtttcttcagagtaaagtcaaggaatttaaagggatctgcaaaacttccaagatttcctccaagaaggcactgtttctttcttagtaggtcaaatatcatggcccaaaatggaatcagtaaacaagagacatggagcagatggaacggaaatggaacctctgaggatgacctgactgtctcataacttctatgctggcttaagagctgagggctgaccagccttatgattaaaggccaagacctaaactgcatgattttgtcccattgtcttcccagctaaaaataagaatcaccatttcttaaccagaaatgggagtaactctccatattacatacttgcattcaggcctccccttaccatttactctgagaggttttacttgtcaagtcctctaacctttccaaaactggatgtcaaacagagctgtgaatcactgaaagggaagccctcaagggctggaagggtgaattcaaacagcctctgaaaagttcagggtaaaaagcattgtataggaatagctcagggatttagaagtcgggaaatataggttctatttcgagctatgccttgagcatgttgctctctttacaaaaattgccagatgtgagaggaaagattgcttactttgtggagtgtttaaggaattcttaatcagagaatctgattaaagttaagaatgaaactcagctaatggcttttttaaagcaaaaccaacaaacaaacacactgggctgacaagctctttatttttctgggttaatttttattgtctgccctcaaactgaactgctttccaccttttttgagaaagaatgaacattttgctaactttgagttaggaaagggaaaggaaatcccagtgtcacagggttggaagggcccatggataatacataattcagtatcttagccaattcttgatttctctctctctctctttttttttttttttgagacagaatcttgctctgttgcccaggctggactgcattggcgcgatctcggctcactgcaagctccatcttctgggttcacgccattctcctgccttggagtagctgggactacaggcacctgccaccacgcctggctaattttttttgtatttttactaaagacggggtttcgccgtgttagccaggatggtctcgatctcctgacctagtgatctgtccgctttggcctcccaaagagctgggattacaggcatgagccaccgtgcccggccttgatttctctctttaccacaggtgccaaggtacaaacgtgcatggtttaagcaaatttaggaagatgaagcataccacctgcacaggcagttcattccacattcagtttactggtgcttacaaagtgctgaccgaggtcaggctgaaacctgtggccctgcaccttcactgatccttgccctatcccctgtcatatcacagagcaagcccagttgctttcttccacatggaaatccttcaaacacttaaggacactgtactgtccctttagatgttctcttcttcagttcgagcatgcactcttccttcaggccattttcctcacgacgggctataggttgttcatgtcctccttaaaggtggatcccataaatggtaccatagtttaaagccagtttgatcagcacagactacgacttttaccattctggatatattgtcgtaaaaacacaaagtttttttttttttttttttttttttggtcttcctttgtcacctaggctggagtacagtggtgcaatcacagctcactgcagcctccacatcctcccacctcagcctcccaagcagctgggaaaagaggtgcacaccaccacaccaggctaattcttttactttttgtagagatggggtctcgctctgttgctcaggctggtctcaaactcatggactcaagtgatccttccacctcagcctcccaaagtgctgagattacagacatgagccccagtgcctggctaaggcttttctttttcttccaaatcattccatgcttactgtcagctaaaatctctcctctgttacatagctcctgtcttatatttgtataattaaattatggtacttaaacactctttacatttatcttctttacagtttcatctggttaggttggcccattgtttcaacccattccaaactattttcggccataagaaagacgctaaggacttcataaactgcttgaagcgtactgctctgagggcttccgtattacgccaaacgtttcattcatgcaagagccctgtgaggtagagattcccctcctaacttagttgatgaaactaagcctggaagattaagcaaattgctgatggtcacactccaagtgctggctgaaaccaagattcaaatcttaagcattctaactatacatgactagttcttgccattcttctgtgctctttcttaggatttctttggattctgtttctgacatttaacacgttggctctttcttcatcttcaggtagagttatcagtgtcctcaatcaattcatcattttgaaaataattgcgtataactggcctgaagacaaagccaattgagctcaggtgctagcaatctctttgtgctgtctttcattacaaagccatccaacgaaactctcactggccagtaatttttcattatgctcacaaggacattgttggctcatttatttaatatatagagtgtctactatatgctaggatcagtgtcagacactgggcatacagcaaggaaccaaactgacatggtcatcacgacaaccttgtcagaggtcaagataggtctggtttaatttactcatagtaaaccatgctgactcttagtgatcaatgcttcctcttagtatggaaggaactgccacaatgacacttagtttgcctgcctaggggatgaaaattagtactgagcccagcaaaatgagcaaggtaagggcatgcagaacagtgccattaagagtgatgctgctctgagaatcataggctccagcctatggtagcaacttgacccatcctgcagggagttttcatttttaagaacacagggccaagttttcatgtttccagctgcatgacaagtatctccttttccctgtaaccattcactgacaacaaacgcacttttccgaaggcaaacacctacagaatttgcttagaagatagtctgtgaaaactgatcaaagtgaaatttgaaagataactgtggaaaataatttagcttccatttattgagcagctattatgtgcttggcactgcatttcacacttttatttattttagtcctcatagtaagcctactgggagtgtaatttttaaactcctcatttaaaatttttaacatgctttttacacatgagaaaatggatgcttggagtgatcatggcacacaactggcaagtcaaagagtcaccaggcctagaactgactccaaaagcaatgttcttcctacctcccacatggaaacaagttgtaccctttttatctttgagttattaatattccagcaaggaagagtttaaaatatcaggagaaaacaaaagagcaaatctggcgtgatagctaaggcaatcacctcattattatagccaataatttctttaggcctcagtgtctcaattggttgaatcaattaataggacctatgtatcacaaggtcataattaagaatgactacaaagaggttttttgagaaacagaagattagggctgctgcttttaggagccactctacttccttcactgtctgcttgatggtatttgaactaagctaaatagaaaataaggtctttacatcctaataaggactggaggtctctttaccaccattacccaagcttgccagcctcaactgcagtgagaagatttactcttcatctttctgcaaccacaacccctacactgaaaatggccaagcttttcatgtttcccaaggagcaaaccccagtcttgatactacttgaagatgatcttactacttaaatgaaataaccaaagtcaaaatgagcttcccctttttttctcctcttcgtatcgctaattgtatttactcccacccactgtcagagaaagagccattcttccacgttgccaaggctattcttcctatgtgtgcctttgattttcccccacttatttttcccatcaatttgcccatattctcccatcccttgaattttcaatctcttcacttctaccagatcctttcttcttgtttacaaacgtgcatgagcataccgtattctttaaaagaagagaagcaaaaaacaagcaacttttctcagctccgctccctgccccctcccaagctaggatcctctctattttcacaggtcttgaaagaaaagtccacttccggaccccccactctgtccttcccttcttgcaatctggcttctgcccttgtcactccactgagactctacagaccgaaaggtcaccaatgacttcctcacgaccaaattcattggtattttctccctttggtcccctcacccttctctgtcgaccttgatctgttgattatgcatttcttttgcattaacatttatttagcaactacctgatgccaatcacagggctatactgggggctcaggcttcaagtaatctttcatgactaagagaagaagtattttctcacttatcttcttagttctctagtatcttcttgggcctctctagctgctgccattcctaagtatactttcccaaggatctatccttggccctcttctctagagtcctcagtaacaatctcaccacttcagctactaccttggacccttgagaatcagaggctgattctaaatctcttcctactccagccctttagttctgcatttcaaatgcctggtacatgctcatatactggactctcattttctcataaacctactcctgttttatttatttgaatagttactggcattctaatatagtcaggcccaaaaccctagcagtatgttggattgcttccccctctttccctgttcaccacacttagattgccagaatatgcagattcttcctccagactatttctcatacttatctcctcacttccatttccattgccctaaggtagaaactcattagcttacacttagatcaggcttttgcaacctttagtcattcccctaaggccttcaagatttgggaaatatgggcagatcacatgcactatattatttatttaatattttaaatttacttgacctacattgttttctttagattcatccatggcaatagtttatagaataagaggttcgatatacaaattatatttttaaatatgtacttaaacctatgttattattaaaatctgaatagcacttagatttgccatacgtgccacaaaccgtacatcatccgtactttgtgaaacacttatttttattacacaaaagccttgtaatgagtattctatctcattttttttggcatttcaacccatctgattaaacttttccaaactaattgttctgaattataacaatattctgtctgtttcttgctcaaaaactcattctccacccaattatatctgaaatccttaaccaatgtggtctctagtctgaatagacctgccctcccaacatcatttcctgttgctcaggcagccttatctcagccttgatggaagcaatgcctgctaatcactgcttcccatacattccctgcaccgtcctgctggctccagcccccacccccaccccatcacctgccttcaaagttctccctcctcctccccgcttctgcagcctccttaaaacatctactaatttcttcagctggaagtaatctttccttcctccaactcccatagccctgtacccatagttttcttttgacacttttcactttttacttttaatttatgttacatattcacattttatctctcctacatgtgtttaaatttcttgagggcaggctgggttctgactcatctttgcatcctcctttcacttagtgaagtacttgcccgcagaaggaaaataaagaccactaaatattggtgaataaatgaatatacggtcaggcaacattttggtttaagtgattttgattagtttcctcatctagtagcatttttttcttaataattcatctgtattttagtggtagggattaatgaagggggtgaaggagcttcgtatatttcacatcttggcccactttttcttacatttactttcatttaaacgagacaatgaaatagatgtaatgaagtatttccattatatagttgcacaggaaaggaggctgtttggagtgaaaactaaagtttttattctttttattttatttgctttcaattggaagatttctaagaagacagtgctacaacaaaatttgttttatttttaaatttattaagtgcactgtttttatcagagccatcctcccaatacctaagtaatatggaaagtctataaaaccatgtctcctggagggctcacttacctccacaaagatttttccttgaatgactgaccacagctgcaggacagccttgagcatttagtttggcacccacagagggagcccagagcaaaccaacctgctgcacagtgagacagaaacaccctctgattattctgcccttttagcagagaccctccctctagcctaaatggacctgcacattctgatttcactgggccatagactctgccatagactctgtgtgatactccagaaaatacttctcagaaagctgaaagctttgcattcatcagacactcacttttgctcaaatatgatatgaataagtcttccagggtaaacaacaacaacaacaacaacaaaaacaccactggctaaattttctgttttaaaattgtcaatattttagacttcatacattttgattttttttaaatttagaagagagggaaggcaaagtaaaaaaaaaatcaataaaaggcaagagttctgtcacttagatacgaacatgttggactccatatgacacttgctgtagccattagtgagaaattagtagttcttactaatatcaacaggccattttatgtactaagaagtggtcctgacttttgaaatcttcttctttctccaaatttcttcctaaaatattgttccccatgatacagtgtgctatagactgaatgtttctgtctttcccaaattcatatttgggggttgaaattctaacccccaatgtgaggatattaggaagtggggccttccagtaggtgattaggtcatgaggatggagctctcacaaatgggattagtgcctttataaaagagaccctggagagctccctcaccccttctgccatatgaggacatattgagacggctgtctctacaccgggaagtaagccgtcaccagacactgaatttgccagcaccatcatcttggacttcccagcctccaggactgtgagaaataaatgtctgttgtttataaactgaatagtttatggtattttgttacagcagccaaaaatgactgagatgaaatgtaaatgagcaattaaaatttccttaactgacatgagaaatctcaggttggcttttgggcctccacaactactggatgactttaattgttggtcatgcctagcagtttctacttaccattccaaagctaaaaacagggaaaaaaatacttttaaacaggttatgaagtgctcttcctgtactcaagagaaataattatctataccaaaatcttaggataactaagggcttttcttgctcagagagcacgtgaacttgataattctctgctaataagtgctgccatcttgaatacagtgctagaatcagaattctagcaataaatttcaactgtgatgttcaagcacaaaacagcctgagcaggtgaggcccttcattgctgtaggcattatcagccaattctccaggaaaaggaaaataatcttctatgatgtcaggaaacgtcatagactcacagaataatagaactggaaatggcctcaatagatgattctgttacacgtgtcagcatgccccatgtgccccatgtgcttcagattgagctgcttgctctttgtacacgtccacatctctgcctcaaggcctgtcattagcactcttgataccgcagactgatagtacccatggagattccagaacaagacccagacttggtcagacaaagcccagcaggatcccttgcataacactaagatcatgccttggtaggctttgagccacatcagccaacaaaacactacatggcagataatgttccatcaagattataatctagtgttacaatcaagattatgaggcatgttcccaacacaaagaaaagataaatgtttgaggtgatggatatcccaattatcctgatttgatcctaacacattgtatgcatgtaccaaaataccacatgtacttcccccaaatatgtacaattatgatataccaattttaaaaacacaagaaaaaagattatggggcagagaaagtcatgttggagcctctggttgattttacctgatgttctaaaaaattccaattcataaaaaccatgttgaaacatctactatcaaaagcttatttaacttgccttttcaacatcatggctacatgagcacactgtgaaagaagtcatgttcattaacgcatgccctcaccatgatgttatccagccactcctggtgaaagtgagtttttctgtaagttcgtaatgaaatataaagctgattagaaaagtcaaaggacatttttaggagaaagagtaagatgataaaaaacgaatatgagaaaagtgaacagtgggacttcagcagggagtcagttgctcagttgacttaactgaaagcacgaatggaacaatctaggtctccagtgaatcctctgaggagctcaaagctttcaggtgtggtggcagcaacacctccctccagggaccagcatgtcacagtaccattcctgctgacgcaccaccatccagacattatttactaactagtttactgcattctgtaggccagtcctacccatcatgatggaacttttttttttgagataaggtctccctctgtcaaccaggctgagtgcagtagcgtgatctctgctcactgcagcctccgggctcaagagatcctccgcctctcagcctcccaagttgcttggactacagatgtgcaccaccatgtccacctaatttttgtattttttttgtagagaggaggcgttgtcatgttgcccaggctggtctcaaacttctgagctcaagtcatccgccctccttggcttcccaaagtcctgggattacaggtgtacgccactgggcccatgatgtaacttttgacaatgagttcccaacactaatttgattcctatagaagaggaatttaacggcatgacaagttatttctacgtatgtaagtgaatgaatctattacacatctctcaatgaaatggggggttctgtaaagcacttaaagatcctttgggaggtggagtactgaatcatttttattgttatacaattacttataatcttcttcccttgttctaagtatttgtttacataaactctgaaacaaataaatcttgcctgtgcataatacacattttttttgcactatttggaccactgatttttccatttatttaattttttgaatgctgacttttgatagtgattcagcattgctactgtttttcataccataaaaaatcattaaactgttgacagaagtaaagataattagctataaataattcccaaattaagccatggcctggcagtatctctttccctctgaaggatacagaatgtttgggtatcgtaaccatataaattaatttcactttatgcaaatggttacaatttctattatctggagaaattaagatgtcagcttttctaacactttcaggggtgtgaccttatatcttctccatcacagcttgatccatggtctataaactatattgttcaccttcaatctatgcaagtctactttaaatcactccttccttcattacctatcttgtccctgttctctactcacaaatatttgatagctatatgcgtctcttaatcactagggctagtgccaatgaaattttttcctcaaaaatcttccctcttacaactgacgtagctcactagagatgcagaactgttcgttgttcacctgacaaaaacttaacttgcttcttcatggataagccaataaccatgttaaatgcctgaataaaagtaaaaacaaactcctgttggctaagtttttaaagccattctgttgtagcttcatgaaaacatgtactgcttcatgtactctttccaggccagacccagttttgaatgtatcttttttagaaggaaggggttggaaattgttaaatatatatgaaaagactaaatctgtgtgtcttacactgatagccgaggttgtaggatcgtctgccaccttttactagctgagtaagtctagacgaatatatttaatctctctgggcattatgtacttgcttaacatgtgaaatgagaataataacagtgtataaggctgacagtaaggaattaaacctcttttgagcatccttccaactttaaggatgggtccaatttgtctgagggcaatccgatttccttgccagtgtgaccaacttctggcccacatgaaaagacttttgctagaggcttctgggaagcctagctctcaaaagagatccagccaggtatattagagcacagctgtaatctcagctatccaggaggcggaggtgggaggatcaatggaagccaggggttcaagaccagtctgcgcaacatagcaaggtcccatctcaataaataaataaataaataagaaagaaagaaaaagagaattcacaagaagccacttggacctgaataaagtggcctgtagccctggcagtcatgttacaactatgcagaaaccctccctgagggtggtgccggcatgtgaacaaagagcagcagagacaccctgggtctctggggacatgactgaaccactgactcttggagtccaccataccacacaccttggaacttcctcactatcctttaagccagtttgtgaaatatttttctgttattttaaggcaaaaacattctaactaacacagcttcccatcacctttttgtgaatacacacttggggaccactgatttagaaaattctctgttcctcattctgattctttaaaacttcaattttaaaaacgccatctaagattaatgtccataagcctttgctatgttaataaagaggcagttggtatttttgataaatatccttgatgtttcatcagtatgctaacacctagaataatgttgtctgcaagaggtctgcagacctctagaaaacaacttttcaatatatagcaaaacttaatgattttaaaacctaacattctcctcttcatgtaagaaatacaagggtaggctgaaacgtctgctatcaataaggatacctttttaaaaatgttaaatcgaacgcagagaattaaacagtagaaaagtattcattttaatgctaccattatcctgaatatagccggtcaatgaaagaatgtttaaagaatatttcaatttttttccactagattatttttagtttaatcaccaactgcctacagattatctagctggcttgctaactatagttatattcgctctaggacaatgaacttggcgttacatttttgactgatttataaattagtaataaaatcaacccaatttaataaacccaatgtttttaaaatgtatttctacctatttcccatagttggaagttttgcatttgttctcaagtttcaccaatgacctttgaaccattttcatggatttgtaaatgagtgtaggtgagtaaaagccagcaaagataaaacacaaaatgaagtctgccatttgagatctttcacaagagtcactttcctttcagaaaatttattcatttaagtcttcttatttctataataagtcacctcctcaattttcctataatattttaagtacacgaaaagttgagtgggatctttagataaagactttcactcactttaatatactgtcaaagtgatttttaaatatttcagaaagtttttaactgctaaaaggtaaaagtttgccatttgctagaaaattatcaaaactattttagcttatttggagcaggcattaaagttattgatttggggggaaaaagaaagagctaagtatttttaagtgaagcatcacataagtgccagaacgcattataggaacaaacataagaaacgacattttgtgctgcacatatttaggtataaaggagaattttcaggctgagaataaagcagaatggaaccctaaaccagtaaacatatctcccccctcttaaattatcacttttttccattgattgaattccttaagataacccataaaagtatggtctctgtgaccataagaattaaaataagggtcaggcgtggtggcttacgcctgtaatcccagcactttgggaggccgaggcgggcagatcacaaggtcaggagatagagaccatcctggctaacacggtgaaaccctgtctctactaaaaatacaaaaaattaaccaggcgtggtggcgggcgcctatagtcccagctactcgggaggctgaggcaagagaatggcatgaacctgggaggcggagcttgcagtgagccgagatcgcgccactgcactccagcctgggcgacagagcgagactccgtctcaaaaaaaaataaaaaataaaaaaaaataagatgtcaacttgagcataaacccaatataaatttggtctcatcttcacattaatacatttggggttcaggtttgttttgttttgggttggaaatatttatttcattgacaaacaattccagagtgcaaacatttgtcctgttaagctgaagccaatgtttattttagcactgctaggatacctaagtgttgtgtaaatgggaaaatactggctggagaaacatttacacaaaagattgtgtctattaagacaatgaaagtgttttaaaatatatcctttggagtgagtttatggcaatgaagaattacgcttcaaatattatgaagtcattcaatttggaaaaagtattctagaaacttgcttcctagtctctctgatacttcacaaaattatccttggaaaatttaaagatttcttcacttcttcagtctgctattgacaaggatctggagattgaaaaggagggtctgaaaaaaattgatttgggtacaaaaaatataaatgaatgttgacaattctaacatgtgtctacatagatacacagagtaaatatggatatgaattaaaaaactaaatcagttaaactagcacctaatgtatttagtggttgttcaataaaagcagaataagtgaataaatgaataagaacattgaattaatgtccttacagttaatggaggtaagggagacacaccccatttgatgtgttctaacccatgcttttcacagcctgaaaaataatcctggaaagcactgtgggttttttttgttttgttttgttttgttttgagacagaatcttgttctgttgcccaggctggagtgcagtggcgcgatctcggctcactgcaagctctgcatcctgggttcacgccattctcctgcctcagcctcccgagtagctgggactacaggcacccaccaccacacctggctaattttttgtatttttagtagagacggggtttcaccatgttagccaggatggtctggatctcctgacctcatgatccgcccatcttggcctcccaaagtgctgagattacaggcatgagccaccacgcccggcctatttctttgttttcagacagggtctccctctgtaccccaggctggagtgcagtgacatgatcttggctcactgcaacctgtgcctcctgggctcaagagatcctcacccctaagcctctggagtaactgggactacagacgcatgccaccatgccttcctaattttttttggtagacagagggtttcaccatattgctcaggctggccctcgaactcctgggctcaagcaatccacccccatcggcctccgccagtgctgggattgcaggtttgagccacggcacccggccaaaagcactgttttagatgaatctccaaagctccttagcgttattcagatcagctgtttaaaatgaattttaaaacttaattgaatgggggttgagggtggatttattgctgatctagctttatctcttgctccttccaaactcacattcacatctctacttccctcacccaagaaaaatgtctaattcacaatattaattgcacccaaaatgatttagggagcataagacaaatcaggtccaagttcacaaacaccgtcattcttatcatatctccttttgcccatctctctgtatttagcttcaggtttagccactgttctccaaatgaaacaaaacaatagtctattgctccttacgaagacatgacagggaaagatttattgaactggaatgtacctgaaatgtcatgtagtctatagaccgtcctccagatgaacacatgtaaatagctctgtatgtaagtatattttgggttagggatattatatcacacagagtaaaagctcacttactaaatttagatacgtaacttttcaaagtagttatctcttgtctccacacaaaattcagtcatgcaaatcttattcatttcccaatttgtcaccttcaatgatgaccaatttcagatgcagttgaattatataagagttgcttggatataagtccaagatagttgaaattttccaggatagttaattatacgcagacatttcaaaatagaaaaatgaagttctttattaagatacaaatgtatatagatgcagagtccaaaagaattagctttcttgattaatgaaagtgtgtattactgataatatgatagaaactgaaaaagagacatgtgcgttgtcagtagctgcatttgacttaaattctgtgagcaatatgaaaaaagattatgtttacagaccagcatctatcagtggttttttttttttttttttttttttttttttgagatggagtctcattctgtcacccaggctggagtgcagtggcctgatctcggctcactgcaacctctgcctcccaggttcaagcaattcttttgtctcagcctcctgagtagctgggattacaggcgtgtaccaccacacctggctaatttttgtatttttagtagagatggggtttcatcatgttggtcaggctagtctggaactcctgacctcgtgatctgcccacctcagtctcctaaagtgctgggattacaggtgtgaggcactgcgcccggtggtggttttacagtccatagatccctatgtgaataaagatagttgtggcttgattcattgccatatgtttattaataccaggttttaccttaggctattggttacaaacctgtgtagcagtttttattcaagacagattaacactcctgacagagggatctactcattgatgcagttttgtggcatcaacacaattaactttccttcattgcacatcagtggcatgttaagtttttcctaacaacctctacggatgcatataatctcatcacaatatatgaagcatgtccaataaaaggaacattgatgggtactttggttcaatatagcagcaagattttatagaggctggaccaaagcaggtgaaatttgatcattaaaacatctccttgttcctcagtcctttcccagtggtatggccatgttagaaaccatagattgctaagaaagaagtgaatgaagagatgcactatttgtttgcaaagaaagcatgcttccgtttttatcactaactgaacctcagaatctaatcatgcatcctattcataggcctgttacaaagtagtccacaggtgacgtgtgcccacaaaaaggtcccatgaatttcactgagaaaatgttacaattcttcccctattttgcataggttctaccttaccacactttgcttgtttgtgtgtatacatgcatgtgtgtgcatctatatacggcctattttacatatatttgtaatatcaatatgctacctagggtactactatatggccatttttgccagcatgctagttaagattgccctaatgtgtacaaattcaattacattaaattctttattagaatatctttaaataatttactataaatctaatttggatttgcaagtcattgactatatttttcaggtgtacatatgaaaggttagaataatattttttcaatgtggctttttttggcactttaggtatatattacagtatataaatttgtctaccaatgtttacctcctgcaaatgcatatttcaatctcagtgaccctaaaagcttgacagtatttgggttttaaaaggcatgaaattatttaaacagaaaaaaagaaggatgagttctggaggaggggaccacacaagaacgcaagtcaaaatgttgattcttcttccctaggactctagaggtagtgatgagagaaaggaaactggcttggaagatttcatggagtccaggagaatccttccactgagagtgccagatggcaccttacagcaaagctcagcctggatgtgagaataaggcctgaagaaacgagagagaaaggatcttacttctgaggaacacagaagagcagaagagaggagaggaaaaaagatgattttaaggccaggcaccgtggctcacacctgtaatcccagcactttaggaggccgaggtggatggatcacctgaagtcagaagttcaagactagcctgaccaacatggtgaaaccccgtctctactaaacatacaaaaaattagctgggcatggtggtgggcgcctgtaatcccagctactccagagactgaggcaggagaatcacttgaacccaggaggcagagattgcagtcagccgaggtcacgcctttgtactccagcctgggcaacaagagcaaaactccaactcaaaaaaaaaaattatatatatatataatattgctaatatattacatatatatataatacatatatatattctaggaggaactcaaacagctcaatgaattcagagctttggcaatgaaataaaattaacaactaccactccttataacaacttctgggttaagcaaaatagaaatgactatacccattttacaactgaagaaactgaagctcagagaggtgaaacaacttgtccatttaacctggtttcttaactggactaacctgggactgatattcctggcttactcctctttccagtataagcaggccaccttacagtatacttgtgacagtagagacaacatttctgtaacttcacacttgagcatacaaaatctccacttggtgaagaatctcagggaggaagatatgggcaagaacccagggaaacaaagtatctagagacttaatggcaagatgaaattttggaggctttgagtggtggtggtagaatgttaacaatagcagaacaccaggaagcctgtttaagggtgctttgggtccattttgtcacattgcttcacaaactactgtgatctattgcaaagaacttcttaaacccactgcttagatatatgtgaagcgtagacccagttacaagacacaaaaccacaagacctttatctgcacttcaaagtcagcacaaaaacaagggtcgattatctcccaaattgccaaactaattctcaaagcccaaatgcttccaatcctaagtgtggatgcagtactatatctgagaaaagagaatgactgtgtggggaaatgacatcataacaccaagatgattgagccacaaatggaaaaatgagctcttcccaaaagagagaaaacaactgataaaatagtgccaaggtttgcctaaagagacaagagagaacatctaagaatgggggataaaaatctacatatgttgttttggtgtctgacacaatcatcctaaaccaaatgcattttgatttgaacttaattctggaattttttattgtttagacccaagagatttcaatggctgatgacggcactcaggcaggtttcctggaccatccaatcagaagtcctctcaagtttggtaacacaaagtccagcttcagagcacaggttacttcaattatcgtctccaactgtcactaggtaacactcaaaagttctctaaatgccaaacaggaaagggccttagggggcattcctcaacggatcactcccttcaggcacttaggtcataggtctaagggtttttttttttttttgctccttatcagcaccatagatttttaactatggacctgaacagattgggataaaaggaaacacaactgtaccaccaaactctcattctttttaatcataaaagtacttaattcagaaactttaggggaaacaaattcttttctttcccagaatcagaattgcactgacattgtggcccaacatgtgacttgagctcaagtatacactaaagtgaaaagctattgtcaatatttagcggaacgctatgccatgtcggaggcagtatcagcttcctaataccaaaagaaaattcacgtatcacagggctactgagaagaagtaacgtgcagccccagagggcacagatttctgctttatgtaaatcagagcctgtcacggcatgcatgattcactgctcagggtgtactctcctgtgacgaatgagtcccgcttaatttggcagtgattatgcgggttgctggccctctaaacccctttgaacttgtaattgctgctggtttaaataatgaacattaaggggagttgaattcataaaactgtagataattacattttttttcttttccccctttgttttggtgcaggagtatatccacacacacacacatgcacacacacacacaaacacacttctaaggccaccgatcactgtatcatgccaggatgttatcgaaataaactgcagtcttgttccagggttggtcagggagggcagatttgaggtgggggaagtgtggggtgggtggcagggggagcatctgggagctgtgcaagaggaagatcagaaaggcctggatgctctaggaaaggaggagcaatggcactcatgaatattcatagctagtcacatctgtagcaggcttgctttctaccttttttttccccctgtgcagtgcaacatagagcaccagtgcaaacaaaaggagggaattttgcagcttcacgaggctctagatatcctcgtggtggtgaactttctccatgcttttacattctacatatggatttttaaagtatatagtaggagatgtgtatatcctttctttctataacgaaagaaaaccatcctgtccccacatttatgaagtggaagaaatcacacactcccacagcacatggatgactcaaagccagtcctcctttcccccttctttccccaaccattggtaaaaatcacccagtattctttgatccaggaaaaaacaaattttgattttatttggagaaaaatgaaacgttactgatgggagggggcagaatccaaagttagccaagtcagctagctcttcccctccctgaaacaacaaagaatgaatgataaatttagcagcctcatgttcagttttcaaacaacactgctgagatttatagcttcactgctcccatggcaaactaagctgcacacagaaagctatctgtttttgatttcactctgttttctccagtttttgttcttttttctatttgcagtgttttttttttttaactctacattttctttttcctggtgtgagtcgaatatcaaaggctagtgctgttggtaagcctccagtttgcgagagccactcaatgagatgttattaaacctgcgtcacaacatggcagacggtgattaatagcaactgtatcaacggtagcaacttaaaaaaaagtccctccagcagctcgaaaagggatcagtgaagtaagaataagaaacgtctgccagaacccagggcccaagatgttcttagagagtagagtaccctgggattgtgtttgacagaaagaaaaaagaaattcctactattatgcatataataggaacttttgcctttaactaagtcacttatacttaaaacagctacacattataaaacagctacacattaatttaaaatgaagtctgtgtacagcttaggaatcattttattgatgcaatggtgtcccccaaaataactagcagatggatttccaccccctcaatgaaacactgaaacaaattgcagaattgtcaaaattttatcgtgaaggcacacactctataaaaaggttgatttaagtgaattgtaaatttgcttcattgcacaatatttttctaaaattataaccggaaagtattctctgtttaattttttagcatatcctttcacaaaacacatctgctgtgaagtatttctaatttgtgctaactgctttttaacaaacacacacttgtcactatgccatctagttttattagggcaaaaaagtacattcccctccaatctctttgtaataaggattttgacctgtttctgatgacgcaaaccgatagaaaataataaaattgtttgaacatcaaacacgagtgacacataggaggttaaaaaaatgaggaagaatgaaaatgcagtcaaaccagaaagtcaaagagaacatggtaaaggagacgaaatggctataattgtggagaaagaataatcgtctacacagagtgtgggcggggttggtggctcatccctgtaatccctgcactttgggaggctgaagtcagaggatccgcttgagcccagggattcgagaccagcctggccaacacagcaagaccctgtctctactaagagtaaaacatttagaagtgaactgggtatggtgggtcatgcctgtagtcccagctacttggaaggctgaggtgcaaagatcgcttgagcccagaagtgcagcgagctatgatggtgccactgcactccagcctaggcaacagagcaagaaccggcctcacacacaaaaaagtgcctgattatatctcattatgagaaaggtaataagcagactaaaaaaagaaaaataccgctaactaagagatagaccaaccacagcagggaaggaggacaggatgcactctcactctgagtgaaaatggagatcacctagcaacagtacaagtcctctttttattccttcatttatttctatctcacacccctcttttgtgttccgtcaagcaaaatgggattctatggtgtttaggacagaggtgaaacaatgacaccaaaaattttgaatttattttaccttccaaattattagggaaatttaaaagtatttgtccccttaaagggccaacatagtgattaagagccaacctcccccagtatttaatgcaggcaatgtggtaagtgcctggcccatcattatctcctttgtccatcctaacaaccctaggaggaagtattatcattatccctattttacaaagataagaaatggagactgttaacaagttaaataacttgtgcaagacagctcagctaataagagatattgaagctccatccaagctttcagtcactctatgatcactgaatattttctttatatgtggaataaaaaatccatatgctcaaaatattttacatgttaatcttcatggaatcatagagagcaataagaaacaattactggaccttgccggcatctaaatgatccaaggaatgtcttcacttctttacagcataggaccttgcgcatgtgcttcagaagaaggagaaacgtggcaatctagccagtaagacccacatcatctcatcaatgttttagatttattatattatgcaacttcaatctatcaggcttataatatacaatttttaaagtagtgttggtttttgtggaaaatgtaaatagtatctatacatgcaaaacaaattatttcatttatataactgagttatgagaacaaaaattattattgtgtaagctgatttggagtccgagtattaaaggcaatgaattttaccactagaatttagacttcttgaaatacctaagaatccaagtagatttctacccattcattcataaacaagcaaataaaagaaaaaattcccttataatgtaccagtacaacagaagaaactcatgacatcaagatggaaagatgattataatttgataactccactaatggcagggggtaaggcacacataatacaaaacttccaattagcctctgcttctctccttaaaaacaggccagggaatggagaagtctggagtgctgtggccccatcgctaatggttaaacatactctgggtaatgacagtcccaaacatcacccagcaggccaggtcggtcattgatggtcccacactacattaactccagcttcaagccaagaggactagtcccagaccacccgcagctataatttatgtcatggggtgagggttggaatgagaagagaaaaagtaattattgagtaccaaccttgttcaagagagatagactgttttacatattctatttttttcagttccaccccaccctgacaatctgacccattttacagatgaagagttaaagatgttaaataactcatccaaataaacagcactagtaagtagcctcctgtgaatcaaaccaaagtcgatctgagcacaagtattgcatgagctactaagaatttctacctttctgtttcaccccttgtgtagaagaggcataagaactgaaggtcatggggcaagtcactgtcaaaactttgatatttttacattctttttgtctaccacccctgtgctttctcattcatcttcaccaagctatgtcaatggaatatgcattgtatctgtagtgcacagatgacaatttaaatgagtatttgggagtagtattttgctatagaatcatgacgacaccacttcttcaattaaattgcaaagcattcaggaacttaaagtaaatgactctctagatcactcatggggataaatttagagccccaaagagaaagcaaaatatctggtttgtgcacatgcatatggcccgtagagggtagggagagcatagtgtggggaggaagagagctgcacatggtgaaacgcagggcccaacagcaggccctggtcttaggtgctgccaggttcattccaactgctcacagtgtggatttcaaatataatccaaacagaagtgacaaaatccaaaaccacaggagcaagcactggctttcaagtgctgtgggaacagagacatttgtttaagtaaccactgttttaaaattgcatacatagtaacaccaaaataaacagcttgcgatgctgtttattttaagatacacaatagtaatgtaaagtgtggcatgccccagatccggggagctcgaacataatttacagttgtagagagccctacgaggactcagctacacgccaggactgtctacttcctgattagataacagcgaaggtcagaaggcattgctttttgtgcagcaaagagccaacaagccaccacaaagaccctgctcctcctgctcgctgtgaattatgaatcgggtcctgtggagagcggggtttgccaagtctcctctacaaagcgtgtattaatcacaggtcctgaggaggggtcaagagcacagtctgacaaaccgggaaatgagtctcgtctgctgacctcgcttccctcagtccttaccctccctgatctaaaacccaaccaaagaaggaaaagaaagagaggaaaaaaatcctgaaaatacacaagctggttgggcgccgaagcatatgtaaaactgaactctaaggaaaagcagctagatcaaacaaaccttacacataatcaaaataagaactcaatttgtggcttattttagccaaccgaatagtcctccccacgccttctttgctcctctttcctgcctccatccaggtgctttgaggaaacatttgagggatctttatctcaggttctctactccaagataagatagtattttagagagctttattagtgcctgggtctagcaaagacctgtaatcctaatggcattactcttggcattctggtctttttttttttttttaatctcaccacaacctaaattaacttgcctcgttgccctcatcctcactggctgtgttatgggggaaaaaaaaacccataaacctttgaacttttccatacacataattccatatccttgatttttttttaaacttatgtttgtcctaaaatattgttaagctaaaaactctgctctgaactgaattaagtcctcccaaattttgtgtgttgaaaccccagcctccatatgatacctatttggagatagggcttttaggaggtaattaaggttaaatgaagtcagaggaaatgttatgcagggacagggagaaggtggctgtctgcaaaccaggagagagccctcacccaacaataaccctgctgcacctggctcttggactttccagcctccagaactgtgagaaaataaatgtctgttgtttaagccacccaggctatggtattttgttatggcagccctagctaactaatatactcttctactaaaattattcatttttcctccttaccagtacctctggaattaaggacaagaaactagactgttctctcttccctttcttcccttattgcctgctcccagcccctacctaagactttccagccacttttctcatgaagctcacagcatttgctttctttcctcttcacagttgttgagagaagaatgttgacttttaagccactccctctttcccctacgacttatgtacatgctagaaagttctccatcccatggcttgcccctacttttgaaaactccaatatgtatgacaaaggcctgtctaatatcttgcctgtctcatttccaatgttatccatctctactttatcagcagaaaattcatcaaacagagatgttgcacctccaagattacaaacctaaaaatgttctttctctgcttctctgtttctctctcttattctgcacctggacttgcaaccccttggtgggtttccagtgttcccagtgtgttaccacactttatttctcccccttagccaacatggttctttattaaaataaaatttattattctgtattatcaatgcaatacacattacatagaaactttctaatataaaaagtaaaaatgtcacctagatctccctacccaaggataatcattcatatgttctgtgcatatgtccatatatattttctctaataaaattaaaattatatcataaatactgccttacccggtttactttgcctagcaacacatagagatttccccttatctcaaaatacttttggaatataatttttaatggttacacagtagtccataacgctccataacattccatatctcctacatttgagaatataggtgactttcaattttttattataataaatatctttatacataattttgcataatttttgtgtacttttagaattatttcttcatgacaaactcctagaaatggaattactagatcaaagaagagaaaatttttagttgttttctttttttaacacatattactagtttatattccagaaagaccatgtcaacttttatagtcattattaagttagatatttccttctaccctggacagtgccagatattataattttttattctcagtttccaccaaataaaaatctcttgttgttgatttttaaatttatttggtcccaaccttggcctcacaagtggctggaactaaaggtgcacaccagcacacccagctaatttatttaacttatttttatttttttgtagagatggagtgtcactatgttccccaggctggtcttgaaatcctgaactcaagagatcctcccacctctgtctcccaaagtgctgggattacaggcatgagccaccacaccaggccaatgctgaacattttttaaatgcttaccagtcatttgtatttcagcttttgtgaatggacctattcatcttttgactttttattcacttcattgttttttcttttttttgagacagagtcttgctctgtcgcccaggttggagtgcagtggcgcaagctcagctcactgcaacctcgtctcccaggagggagcaattcaagcaattcaagcaattctcctgcctcagcctcccgagtagctgggactacaggcgcctgccagaacacccggctaatttttgtatttttagtagagacggggtttcaccatcttggccaggctggtcttgaactcttgacctcgtgatacaccctcctcggcctcccaaagtgctgggattacaggcgtggtccactgtgcccagcctgcttcaatttttttcttactgatttgtacaatgctttatttattagggacactaatcctttgcctgttatataatgttacatatttttgctagtttagtgtttttctttattttgtatatgctgttttcttggcattcaaaagctcttaattttcaaatgtatgtaatttaatctatcacagtttttctttataattcctttgcttttactctcaaaacatttcattaaacgaaggaaagagaaatagtcatgtctacttcaaaaaactcttaaatgtatattttgatgaagactactgatgatttttttctcaactgacttgaagtgatgcctttaaaattagtaaatttctttctatatttgggttgatttgtgaattcctattttgttcaaatgatcattgtgcctattgtgtcagccagtgccacgtcatgtagctttatgatacattttagtaattctcagtgcacaagctccctcatttttcttttccaaaaatatcttgacttttcttagttgttttattattcacatgaactgtaggattatttttctgtcccaggaaagattatctcattggaattcttacttactggtctgtcatttcaaaaactgctctaacatcttccctctcctccccttgttgatctcacccttaggtttttcctgttgtctgctttagtccctcttgctctttggtgctgagactgcctgagaaaggatgagatgatgtggagagagtccattcagcccggccctttttgctccaagtctgcatttccgtgccttcctaattcactctccatcaccctcgccacagttcctagtcataagtgaagagaagctttttcctgacctccctcagctttcttgctatctttacaaaatgtttgtttcttagtaccttcccaggtgtgctttggtccccatcttcactggcctccttttctctctcttttttttttttttttttttttgatggagttttgttttgttgcccaggctggagtgcagtggcactcagctcactgcaacctccgcccccagggttcaagcaattctccggcctcagcctcccgattagctgggattataggcacccagctaatttttgtatttttagtagagatggagtttcactatgttggccaggttggtcttgaactcctgatgtcaggtgatccacccgcctcggcctcccaaagtgctgggattacaggtgtgagccactgcgcctgtcctgtccttgatctttctacagaatccacttcctctactttgaaactcctttcctcttcacatgatctgattatgctcctactggtctgatgtctttatctctgctcactactttctttctccacctcttcacatatagtcttcaaaaagactcaaaccccgttctctctctgcactgtctcttattttaacctttattcagtgccatggtttcaagtattacctctacaaagattagctccaactctcaaactatagtgccaccattttcagcttccacagaagttcatccacctggatatctggctggtgcgtctaaacctaaggcctctatatacctttagaagctttcctcactcttctcccattcatattctgtgctttcgtctaactgagctgtaacatctgaaatctctgtatgtagaatcaaagaaagcctgattaagcatccagattgaaactgtcttcaggggaaaaataaaattccacttatcacttgctgcaatgagacaattctgtctagtaccagactttgccttccttggaatgggcctatgagatcgccatttagagatgtaaaacaattcttctccaccagcttgaccaggatgaaaaatggcatgctgatggacagttaattctcaggatgaagagtttaggaacaaagaacaaagatgcccaaagccccaaccagcttgctccaaagctgtaataacacaagtgacaatacgtttattgtgaagttagtttgcagtcttccagttctttctcttaagtttgagtgtacaaattccaaaagttactttgactcatgctgccacatatgaatggtctgtcaggtcttttgcctttctcttgcacatgtgctatgtgtaggatttgatccccattccagacttagggcaaaagaaacaagtgcaatacttgtctttgaagagtgtgtcactcacatccaagttcaggtttcatggagctatgacagagcaaactatttcaatggattatatgaaaacattaatagacaccagtttacacttgcacagtattttgtccttctcagaaggctatttctaatcttagctaaccctcaaaacaatgaggtaagaaaacgagcactcagataaattaaataacttgctcaaaataatccagggagcaaaaggctgtgctaagactaggacactggtcaaatcttaatttggtcctaactccactgcttctggtatatatataaccttatacatggtagagatttctttcaccgtgccctgaaatgtttgcttttatcaacacaaagagttaacagattgtcctcactatctaaaggtaggaaagtcacttttttttttaaatgaattacagacatttctattgtctgctccaaccacagaggtccaaccatagagtcatgagaatttaagcatacctctttttatgtaactgattatatatacattttaaataagcatgggggtatttggaatagccatggacaaacgggtacaagtacataaggaccaaagagcatgaaatcatttttctgtcaaacttgctctgcaaaaaaaaaaaaaaaatcaaaaattttagaggatttccagactgacaacaaaggtcatattaaaaactaatgccttttcacacgatcatatttaattacatttaagtgttttactagaaaacataaaaccttcaggtctaagctctaagaggggtttttatcaaagtgccatcaggtaatccatgagattttgctacacagttctaaatttatggcttcacagaaactaacagaaaaactgagcctataattgaataataatgaccccatgttcccatgttctcttactactttaaaaaaaaaatcactgtgaggaagggtttaaaacaagtatagcaactcatgagctgcctgcaggtatcttgaaacactgaaatagaacctataacttttcaccatggggaaaaaaaataaggttgcttttaaagagagtcccaatgtgtcaccaaatctacagggaataatctagcattcatcttttctattgataaaagcctttttctttttaaaagactagtgtagcaccaccccggtacacttgggttgttttttgtcagcgtacgatgggatcacaccatgtattctgggtaagaaaaaagccattttccaattctagtgtggcctgagtcatgggaatatacttttccaaattattatagaattgccaaatatttccaagacaaaattaattctggaatatttgtgattgcaggagaatgatgcaagaagtcaaataaaatctagacagttatattataatgtgataacagaggtatttaaattaacagcagcaacaagatttgatgctgggattaacaagaggagatcttcattatctggctatgtcaggcaaaccagatatcagcagatttggcggggggagagtggtggctggaaggaaactaattagtggcccatgttaattttctataatgctcagaataactagataataatattctcttcatttcttgtcatcgcagaatcccatgacaatatctcttgagttgtaatttttgtgtgtgtggacaatcaagtcagattcaacaaatattcatgttatctattataaccaagaagtaaaactatagtttaagaaaaattatctgccattatattgtgacttgacaacttatccactattagataaaaacaacttaaatttgttctggcagatttgggacttggcagttcagaatatgaatagcaaatgtaaaagcatgaaaatggcattactattatgttttaagaggataatacacctttaaagggtgccagtgattattctgcatactgtaaacaactgctgccaatcaatttagaaagtggcacacagcacctaaatgtaataaggcaaactccattcaaccaccctaatgcttcctacctaagtcactatttcttaacaggagaaatggggctggatatcatctttacacttcataatctgttccaaattgcaaaaacagactacagcatggagaaggcaggacatttccaggagtcctctgaaatctgtgcagtaacactttctaaaatcgaaattagtcttgaatgttagggtcactttatgaccctatcctgcagcaaagctgagggacagtcagtattctcataacccagtcaacttaccctgtaattcccaatcactccacttctccatggaatacacttgcaaactgtggtcatgtggaacgaagaaatggaaattttccctatgatctgaatgaatattcagggatttcactaaatagcatttaatggcactctattcttggagtttttaaatagctgaatattcaatatgcacatgccttctatgttcctttattcaagggtcctcaattccccatctccttgaattctttaacatatttttaaacaattatacttcgagtgatattttatgaaattgggtgctaaactttgagctaataattattttggtttctttttgatggtaatttaataagcctttcattcttcaatcttttcattcaattccttttttttttaagtagactttatttttttagatcagttttaggttcctcaaagcaaaactgagaggaaggtacagagatttcccataaatccctggccccacacatgtatagcctccccattatcaacaccccctaccggagtagcacatttgtcacaactgatgaacctacattgacacatcataatcacccagagtccatactttccattagggatcactcttggtgttgtacattctatgggtttggacaaatgtataatgacacgtatccaccattgtagtatcatccagagcagtttggctgccctaaaaactctgtgttctgcctatcaattacctatttttaaaatgtatctgccagttagtagctcataatctgggaggtaagtttctcagtctatctgaggtgaacctctttttaaacaggattgtctgatgtaatttgaaatatcttgaaacgtcttaaaatgtttttgcattgaggagactatgcatttcattacccccatgaaaagccattgcaccaccactgtactggcaactttaccacaatgtcactcagaaccatgtgaacaaaggctgctgaatcccaaacacatcagtctttccatgcagaagccctcataatccaattcaaaacaccaaattgggactacaagtaaaaggttatgacatagcaatatgcaatttttccccctcaagagagacaaagtaaattcagttgcaattttctctcttctagaggagcttctaggatccaacacgacattaaatttttggcctgtctctttaatttgagaaattgtaaaaacgacaacagatggcacacagaattgacttatgtcctctattctttactgaagaagggagtgaagagaaactttgataaaggcagaagctacagtatgcaggtcactattaaaattatctggtggctctttggacagctagcatcagaacactcaggctttcatttttagacattctttaaaactaaccaatactgttgcaggttgccactgctgatcacagccccagcactcagcaccctcccatcccaataaggacatgacggatgtgccattagctctgaacctcagcaacctctgaaattacccttctgcccacccctatctcccatccccacccctcaaaatcattatgaaataggaagaacactcaagcttacagttaattggaaacattgcaaaagaagaggaatgcttaggacagcatgtccacgggaaaataaatcacccagcattgtaatttaatgcattgtgacatcatttcctgaaattaaacagagatgacaccagttcagacgatctctagtataagattccattcaaataattcacagatgttttctcctggcaagcaggaaaacaatgcaaaggctaaggctaggggcggccccactatgctgcatgtttgtgggaagctctctctgctggtactttcagctgtgtgttctgcatgtgcatttccacataagtatttcttaggagactcacttgcatgcatgtgaacatttgcagctctgaatatgagaaagaccatctcttactgtataactaaggtcaacatttcctatttggtattaatttggctcatagctatttgtattatgtagaccagtctcagaatcatgaaggccctaatttccaagcagaaataactaatgtccatgaaatactggttcaattaaccattcaagatccttaaaagatgtctaatgatagaaattatcacagtgtctccagggatacatttgtggaaatggacaagtggagaaattgggggtgcaggatgaaagaggtgggtagcactacatctctaacccttggtgatacataagctctgagcggcttcaagcagctagaaagccaagcacacaatcagaagaccagaatacctaacatctgtgcagcacgttacagtttacaaattgactgcatcatttgagccacacagcaacccaatcagctaaatagggcagataactttcattttgatggtaagaaataggttcagagaggttgaataatatcacagagttcacacctaaggcttccaagttcacagctggtgatcccttttttaaaaaccattaccatggccaagtgctgtggttcacacccataatcccagcactctgggaggctgaggtgggaagatcagttgaggccacgagtttgagaccagcctgggcaacacagcgagatgccgtctctacaatcaatcaatcaataaaaaataataaaaaccataacatgctgtcttgcagacagcctagactttcacactctaaggaagatagcaactctatattctgttcatatcctggaagacaaatggtgaaagagagcattctctctcaaaagtagccccattggagacattctgaactactccatagcccatttcttctccaccttccaccccatccctgaaagttcactaggatgctctggctttcatgacaccaggactctctaatgctatcacctagcttcaacaagcagccaccaaatgttaatatggatttcggaaggcagaatgtagaccatgttctctcctactgaggggtatttccatttttttttcttttttttaggctggagtgcagtggcacagtctccactcactgcaacctctacctcccgggctcaagcaattcttgtgcctcagcctccccagtagctgggactatagatgtgtgcccacacacctggctaatttttgtatttttagtagagacgaggtttcaccatgttgcccaggctggtcttgaactcctggcctcaagcaatccaccccccttggcctcccaaagtgctaggattacaggcgtgagtcatcgcccccagcctggatattattattattattattattttttctttgagacagggtctcactttgtcacccagcctggagtacagtgccgtgatcatggctccatgcagcctttgactcctgggctccacctcatactgccaagcagccaggaccacaggcatgcaccaccatgcccagccaattaaaaaaaaattatagagatggggtcttgctgtgttgcccaggctggtctcaaactcctgagcttcaggcattcctcccacctcagcctcccaaagtgttggggttaaaggcataagccactgcaccggccatatttgggatttgtttggcaaaacctggtctctacatctctacaatcccaggaacaaatgtggtaactttggatgcccaggtccattggtcaaagccttctgctagccatttaactggattaaaataaaaattatagttactttatatatgtacttattataagaatcaggcacagggctgagtactttacattatttcacttaatccttaaaataaccttaccaggtggaactagaattattcttcttctgcagatatgaaaaatgaggcgcagagagggtaatggctcaagatcaaaaatctactgtgttgcagattccaggccctgtgctcttaacctcgacattggactgcctcatttaagaaagaagccatctggatctgcacaagataaagataactagtcaaagggcaaaatagtctaagtctctctgtttctgtttctctttctccttccctccctctctcctcccttgcatatgtgtgtgtgtgtgtgtgtgtgtgtgtacattacaataacaaatttaagatgactaagtttacggtcatatggtcttgatgaactcggtggagagacaggtttctctaacatcacatggaactgaatatacttataacttgggtgcactgtctctgtaggatgatatcctttatagcacatttttattaccaaacccaggccttgacaaaatcccataagtcagattctaataggcaagtagtaaaatgagtaaacacctgagaggtgggcttcacccctctccccaacccccagagatatgaagaggggacaaagcattttgtcatgaacaaaaggcagaggttttagaatctgtagtttcaaggcagctgcatacataatattacatcactttgtgtgtgtgtgtgtgtgtgtgtgtgtgtgtgtgtgtgtgtgtgtctgggtttcattccgttgcttaggctggagtacagtggttccatcctagctcactgcagcctcaaactcctgggctcaaatgatcttcccaccttggcctactgagtagcagggaccacaggcatgtgtgcaccacacccggctaaatttttattcttttgtagagatgggatctcattatgttgcccaggctggtgtcaaactcctagccccaagcgatcctccccacttggcttatatcacttttaaaagtaaaatttgcttctgattctgtaacacacatctttgaaagaagtcccacatctgctaagtgtgagctttatccctatgttttcaaataagaagaccttcagccagaaactggtatgagcaagtagtgtctttgtgtatgagcacttcctgtttctagtccatgatcaaatatattatttgcagcacaactggaggagctcttgaaggtggcaagtggaggtgcccgagggcctaattgagcacattaagggcttcttggcgtggaggagttttttcacgtcagcctgggtattattgcttgctgtttctttctttatctttgaagtcaaataaaaacagttgtaatggcaggcttacttttatgatatcatagtctccatgtgctagcaaaaggaatgtacttctctaggatttccctaagtttttgtctgtttgtttgtttgttttgccattgggtactttccagcaaaggcacacacatttccaagagattctttcttcaatcatcactggatttcttagcttgagaagttaggcagtgccatcaaccaacggaagagggtaatggtatacagaaagtttttgctagttgaatttctaaaaatatatagatagatttattctgttaaaattattgtgaatttttttagaggggatatttgtaaggggcattttgaaaatagggtagttcgaaacaaaaaaattgaggctaattattaatatttagccccagattaagcaaattcagaatgcttaattctgactatggaaacggtttatcaaatcacttgattttttaaatgccactttggactttgtttaaatattttcctcagcgtaatcaattagtgcaagtttgttacctttccccctgaagttggtggtgcaaaggaatttgagagattgttttaactgttacagttggagtggaacttgttcttccaagaaaactgagggtgaatgatttttgtcatattgagactaagacttaacaattgctacagttggcctttgttgaggtaggtttttttccacctctgggccttttgaggtattcagaataggtgacaatagcttgcagttgagaacatatgtagaaagacccctgtggcttattgggaaaagttgctccacgctggttgggtgtttggaaaaaaaaaatacaaccagagttcttttatgttctgctagttaatgaatgcatgaatgtcaaaatgggccaatggcccattcagggggcaaagccttggcagcccccttctttaagaacacatcctgagatgcaaaatacatttgcttaacaaattaaaataatgagataattcaattagcttcttttttaaaaaagaaagaaaaaagggtacatcggggattattgtaatacaagaacaggtcacactgcacaaaagggaacaaaccagtttgaaataatgttaaagagactaataatggagaaatgcatattgaatcatgcacttgtaaagaaatttacatgaaataataatttagactgcatctactttcagtgagctagagccaacatttcactttgaaagtcgaaattaattaaatgacagaaaaatatagtggggcatctctagttccaaggacttcctcatgcctgttagtgcatgtaagaaaagaaatctaaattaacatgtcgctagttaggggtctctattcttggtttctgagctcagaattacagctgagtaaatctttcagctcattaaagattggaaagtaaaagttttacaggaccatcctcatcaaagttactgaacctcttctctgcagtggggtgaagtgtggatgaagaaggaaaacattttcaaagagcaagcagaggagaatttcctaaagctacaagggaggtgcagaaaaggcagaggagcggcacagagagaaagatgggagacaaagctagtgggagaaagtaatgaaaggggcatgttgtgaagaaggtcaggagagaaataaagcagttagtgaaaagcaaaagcaaagagaaagggggaaagagaggaaagaatgacccatgaggctgggaccgggcattgctctgactaaatgtccttgagcagaaccaaaacctaggagcatgggaaaggagcttatccatcctgcaacgtgtccctctcatttgaaaaatggggaaacagaaagtccagggaacttaatggacttaactgaggttcagccagtacagaggatcacagagcatgaatgcagacttcccaactcccccagcttaggctatttgagtcctctctcccaacctggaggacaggcagtcattaaaaatttgagtcggacagagaattctgcacaaagccttgcatacattcaactagatgaaagcattcttgaggtgactacaagctcttactgttagttcgtagcacagcagaggtacaacaagtgcccagaaatcaccagccacccacaactctaatcggtggccatggtgcatgctgggtgccgccctgggcagggaggtgggagataaggtattaagggctcctgacactcccatgtgagattcaactcacaaaatacaggtggtaaggctttctatattgggtaacacggagctttcaaaacaagaaaagaaaacagcacttggcttctccgtatttctcccttgtgactctgagcgtattgatggtggagactgtgagatttctatgcaactgttaaaggtgatcgtcattttggcaaagtcattgtaatgtggaaaaatcacagagttggggacttggaagtctcgggcccttgtctcagcttgaccttcagctagtaacttccctttttgggtctctgtttcctcatctataaacagagcagctgcattctctaaggttctactgttctctgacattggttttgatgacagagaggttgaaaacacacgtagctgtttgcttggaaagcagctgttgaagtgtttattttcgaccaagaaagaccaagcatggaggaggacagagggagggaaccaaacaggtgagctggtcaggagaaggcagctggcctgtcatccgcagctacactgccgttcttagttgctactctaaccaaacaaaccttcatttaaaaatgagaaacccctcccctcacagtcactcgacttccaaattaaaaacattttacaggttagtaaatctccagctgaggtgatgtagcaaagaacagctgtgaagtaattttgataatgatgagaataataaccacatggcaaggttcagggctttgctgttgcagcttcagtgctcctgaatagataaaagtgattaaatactcctgattatccctgaccaatatgtaatggatttacagccctttcaattagtcagtatttgcttaggactcattattttgtctttggttaagtaatcagtccagagaccgcatgttctgtctaattcctctgagccgagtcagtgcagggccctgacctttgaaatggccatagctgcaaggcaagaataaccactaccacagctgcctcattggttctcccagctaatcctgacaccacaggccagatcgatacaccttagtttgctactaatgtccttacatcaaaatggccgatttaggaatgtgaatctatcacttttccctccccaccactgctccaccccttgccctttgtagctctgcaagaagagcccatcagcagccaccaccataaataaaagtggaaccttgtcctggacccatgacactgtaactaatgtcattcagcatggcaacacacaagttggataatcaaagaagaccttcagctttcaatgtgctactctatttttaagtattagcctaaatagaatggcctgaaaacaatattatagcaagaagcaacctctgaaatttttactggtttcccagaatttccaaatgaacagtaaaatataagcatgcctagtttatctgtaaaaatatattgtaatttttttgtcataagagtcttagagtcaacagtatgtatccacacatacaaggattgcaaacaggaagataaagataaattgttacttttaaaatgtctcacatagtaaaaccgtttccagaagtgaacatggttagcttttaagataatggacttgagcagctaaaaaaagaatctttaatgtccaccttgcaaacaaaggcattacagcacctataacccttctgaatttgtcatataaatacatgacatatttgtaaactgcttcagcaattaaagctgcacctgatattgtgagcttggacatgcatgtggcaaggtgcttttttttttttttttttggcctcctagaggagacagctttcgttaacagtgtaatcagcaacgtttatggatttgtgagctccttacagccatttcccttggttgctgttgcagtatccgaagttgctctcatacttttagcataaataacaaatttacttatatatgctgtttagggtcttagatcattttaaataaagtccattcccagcttcttaaaacaaaaacctgctactttctagagggtgctctttggatggtaatagttgatgaaaaaaaaaactttaactagtctgttagtcatcagatttcaagaataagaaaataggcaccttagtttaaaaaaaaatcagtatgagaccgtataacttgctagcaaaacaacaaaaactattttttttttctctttcatcttgacttactgtgagatgctggaagagccatgctctcatgatatttgttgctactttggggaaaatgcctcttttcttctggcgttttttgtccttatccggatcatcatcgtcacctgtaccaggtgaagctacactgttgtctaaaccatcccctagtagaaagaaataaaaatacattagagaaaacatcgcaaggtgccaacaacaagtgcagctaatgatgagctcagctaagcttgttgaaagaaatccattaagcgagtatattctctttcattaaagtataattggagacacaaatatgtaaaagacaaaattaaaccaggcctcttcaaatgttaattttgtgtgtctcacacttgcccatatcattaattcaattataactgtgcacttgacacagtgcagtagctctttgtcaattatggaatccaatgtgggaaaaccgccatcagaaaacctattcagtggaaacgcatccccatgcccagagtgaacacatactgtagggtaatcaagttaaatgttctgtagtctatatattctaggctgcctgcataggtgacagtaactgtgtcactgttcgttgcacataacgcactgcctgctcagcccctcctagagctgtcacctcctaagcacgcacattcgcacacttctcatatgaccctgcactcggcatttgcatgacatgaaaacttttagctctctgcaccactgatcattatcatgaaaaaaaaaaagatacacatcaaggtagggtgctcacttaatcagaagtttctatcaacatctttctcttctgtgcttttctctggcattaattgtgcattagcaaaaatcatttacttttaacagtcatagttattttttcttgccctctggcaaaaatgccttgaaagcctgcctggagggcatctaaattatgtatctgaaaaactcttctggcaaggcattgcaggacccctactttcttaaaattcatacgagcacgtcttcctgtttttgggaaggcatcaatcaagagcagcaatatatgccatatccctacattaatatttgaactaataactttaaaaaaaggaaagaaacaagatccgacttgtggcataatcaaatgcaaaataaatgaagaatacggggacagcactggggctttatagatggctgtgttttccttgcacatcattagcctggagccacacgaaagaggaaaacagagaagtggagagtttatgctccctgctggtgtttaagaagccagggtcctggaaggacatctgggaattgcactgagatgggggtttttgtaatttaagaatagacattcattagcagtaaatgccataaatcccatgctaagtaaaaaccttgtccaagaaagcctaaaacaataaactctgtgctcaatgtagcctgagctggatgctctgtagctttctgaggaatactagagatccatcagctcattcccagacctgctccctcctctcggactatgctacagcacagccatcctgcccactgggccacttgccttctaacttctgggtctgctctgtgggcttccctgtacctgttcttttcctttcttgccaaaaaaccctcaactttctttgactagagaagcagaaaagccacagcaaagagctggcagattaattttattgacatttccattttcactgcaatgcgataccctccatcacatggaagagatgaccctcactatttacagactgacaggccacttcattacaaccaccctgccccaaggcaaagcagctcccttccatctgcccaaacactagagcatgaccccgaagttgctgttctctttttctttgccttctgttatgataagaaaaaagggaccccatatagtcaaagaccgaatcagtatacagtgaaacaaaaggcatttgactctttcaatactggataatatacagtctagttttcatctgtcaccctccctgcacacccatgtacaccggagtgtcgcctggacaaggagacacacacacatacacgcacacccaagctcgtgcagggacacgtgcacacgctttccaccatgccaaggaactgctgcaaggcaaattctcacccacactaatggcttctgactgctccttggcaaccctagcattttaacctgggtggatgtgctctccaaaatacagacactggagcgatctcatcagctgttcatgtgacacagatggagagtggctattaggagccaggcagtgggccttggggatctgaggtgctgttctgtagcctgaggcaattttgaaaagcagtacccggagatgaggaaaaaaaatccacactgcaagtgcaagtttgaagtcagtcagtctgtctgtctacctaccatggataaagatatctttgtgtgtaatatgaaatctatgtaggctatctgaatgtacatttcagataatgtatgtatggaataactcttccttcagtgtcttccaaatataaaaacacactctgtaaacaatgcctgtgtgtatatatttctttctaagcacatatggtttctgtgtatatgtttaagctgaaattgtcaggattttgttaaaatctcatttagctttttttgatagatttttgaatgcacttattttaaaaggttaatggcttaattgaaggaagttcaatgaaaaaagtcatttgcctttttaacccaatcaatgaccttaaaaatgagagacagcatttccacagtgcatcttttctttcttaaaagcaaagagggctggtaacaccttcgaactttatgattcactatatttagtgcaagaaaaaatatagctagattgagcatcctttgatgactgacttaaactggagaagacaggagcatcacataaattttaatataaagcaacccgttgtatataaatgtaaaatatttgaatttagatccagtgtaacaaataattataaacaataatgtgtctagttttgtattaatgactacatactagacacaaaattttaaactaatatatgtttatacctctataaaaagaggaattttcctctcccaaacacaacaataaatacaattgttttttcctccaatggactgtggaccaaatccagcacagagaactaacaacagcataacgaaaatttttgaaagacaactgcgtgaactgcaacctaaaataaaattttgcagctgatgctagagttagtaactcaacatggatattggtgtttttttttttttgttttaaggctgtgtatgtgtgtgtgtgtgtgtgtggttgtgtgtataagatagttggcaatccttggcacatgtgccaaatgagtttatgtgctgaaaaaggtatgtataccagcacaaatgcacgtgccaaatgaggtaaggagatagcatctgaagttaggattcaaaattgtggaatccttgcgggcagttaactgtttcttgcttatcttttgattatgagaagatacctccatgcctgactcagaacacataaccagtgattgttggttgggtgagtaaatgactgaacttatcaatgagcttatgcaagggccctccccactttttgccaacccccacggtggggcaactgcacacactatatacctaaagggtgaaggtcttgttcctctggaacagctgagtgggttacgtatgtgcacacagtaacttctaaacatgccaggaacagagcttctttgaagagctgagtacccacagggcttttttgcagagctaaaccaaaggccattccatcagcattgccacctctgatgatgaaaggctatataaagaaatactgggcatgcttcttttgaaaggttgctaatcccttgaccaagggcatagtctaagttttgggtaaacatactcaaaataaatgtgcattagtgaaacatattgtgtgtgaccatggaaaggaagactcaaggcctgtggacagataaatcggaagtggattaaatgatcagaggagattgttaaaaacacaggtccccaggcctcatcccagacctactgattcaaaatgtcctagggcgggaaaaaggaatttgtaatttcaacaattccttgggtttgcttatgcaatcagagtatcactgatgctttaactggctttgggaagccactgactagattatctaaattgaaatgagatgcagcctcaggaacaggtaggtaattaaaatcctactttactcccatgaatgaggttagcagccacagtgagtaactgcaatctggcctgggccttattcactgtgggaaagccatggtgttctaaatccccatcctagtcttctggtagtaagggttaaacagaaagaaagaagctatagaacattggctctgtgcattggcactagctaaaaaattgtgagaaatgcaaattctcagtcttagctgagacctactgaatctgaaactctaggtgtggggccctgttaatcatccctgcaggtgggtctgatgcccactctagctcgagaaccactgccataaagcacagagaacatccccttggtttgctgtcctcctttgttgctgtctgaaggcctgaatctaatccctgggtcctccttctgtcttaagactctgaagcattttgagagcatctctagctggatttacacctatgctctcaaggaagtcacgcatgctttccttagctgagcagattatgctcagaacacaacattgctctggtaggtagctccagcatacacctacttaaaagagcaataatgagagtgtctaactgcaggaagctaaatcctgggataccatcggcatctgggtgtaggcaaatatccatatccatagttgtgtatccactgaatcaaggaaggacgtcggcacactatgagaggatcctcagatgattgattctaaattctagttctagaattgattctaaattctaagttctagaccaggcttaatagttaaatatgttcatacaaaatatatgtgcacctgggattacaaaaagatttaaaaaaagcttaaaaaaaagaaaagaaaattctcattcataaaattcatggtcataaaaactacctaggcaggcttggcatggtggctcatgcctgtaatcccagcactttgagaggcctgtttgggaggattgctagagcttgggagtttgagaccaacctgggcaacatagtgagaccctctctctacaaaaaattagccaggcatggtggtgagcaccgcagattgaggtgggaggatggcttgatcccaagagttcgaggctgcagtgggcagtgattgcaccactgcactctcgcctgggcagcggagtaagaccctatctcaaaaagaaaggaaaaagtcaaccatccaggcaaaaagattcatcttttggcatattgctttattccatttagccaaaaatctttattttgaatatcaagcacatgatttggaatgaaaaaatgataaaagcagtgatgatgtgctatgatgagtctgataccacagggatgtggccttctttctccttgtcttatcagaaaaacattgcaacaaccaagacagtcctagtccaacttcttctacttaccccatccctgccaaaactgacatttaccattgaggaaactgaagccaggagattaaatccttgcccaagatgccacagctacacatggtcaaggataaattggagtccaggcatggcaacttcaagtcagtgctaccaccactggtattctcacattaacactgtaaattatcttttacttttcaaagcatcaccttgtctgaacactgttatcaatggcagatccaaacaatgcttgattctataggaaaaggtctaagcacagagaacagattagttctgggaccctggggttgggactgagctagacctggtccaagttggcttcaaatagaaatgtgctaactcttctccagaagtcagccagttcctgcaagagctttaattatatttgagactcagaattttcataactggtttaacacagtccaagtgaagactctgacatggagagcaccggactgaccctcagagtccagagatgctaccaatatttgagcctactgtccatgaagtaggatctcatgggctttgatgtcatcactgtgcagtactattaaaaacttcatagaactgtgattacaacgatatattcacatcctttaaagtcactttttaaataatagaataatgcttctgcgacatttggcacactgtcaaacaaacacctaaaactgacctctcagccatgtctcttcagagaaataagacaaattaatatgtatttggttaacagtactggtacttcttttagggaacttgtggtacattatttaattctcatttctccctagttctagaccaggtttaatagttaaatatgttcatacaaaatatatgtcaaggaaataaagaatgatagctcatctggaggaacaagactttttttctgtctctttttgtagcaataaaaatttaccatattcattaacattttcattttgcacaatgtaagttcactaattttatatatacacaaacataggtagacagatatcaatattgatatcttccagacaacccatttccaggaagtaggtatacttatgaatataaagatacttatatgtgttatatgctattttaaacctaaatttatgtaaattaaattgtcactatttaaaatacttcaatttgtgcacaattattgaaatatatttgtagatgaacttaatgtttttgcctatagtcggatacatatatacatttacatatgcaaatttctatagttcgtaggtgttttcagtaaccagttctctatctctagaacaccgtcccctccttttttttttttttttttttttgagatggagtcctactagctctgttgccgggctggagtgcagtggcgcaaccttggctcaccgcaacctccacctccctggttcaagcgattctcctgcttcagcctcccgagtagctaggattacaggcgcgtgccaccacgcccagttaatttttgtatttttagtagagacggggtttcaccatgttggccaggatggtctggatgtcttgacctcatgatctgcccacctcggcctcccaaagtgctgtgattacaggcgtgagccactgtgcctggcccgtctcttctttatccacactgttgtcactttcattatgatcattaccacaagtaacttccattgggcacttgcgatgttccaatccttatttaatcttcacaacaaatgaataaaaccatctccattctacagataagaaaactgagactcaaagaaattagatgacttgtcaaaggccacacagaaagtgtcctccaaagcccatgctcacctcctctattcctttcctcaagctgctgggagaagaagatgtgaagggtgaagctaaattctggatttgccctctctgctaaagaaataaatgccaaaagagaggccctgtatgttcacatttatgtcctagagagacacgggatgacagtacacttaaaattaaatatgaaccgagaaacaagcatctcataatttttgcacagatgagtgtatccaatatgagcctaccctttatctacaggcttatgattatttcctgtggatctaaagctcaaattaaatatgattttgaagcagaaacatctgctgaattttaaagacttttctgagccaagggatctttcaagattccatacctttaatccttcctgttggccttgaatgccctttctcttcatttttctttcctcctttcccattcttctttactagcaaactcctattgaacctttaaaacttagtgaaaaaggaatctccttcataaagctttccccggctcccattaacagagctagtgtgctatgctctctacttcttcaacagtttgttcttacctctgttatttacttttcttcttgcaatttatctgtttactagtttgtctgtgagcttttgctagtttgtctgtctgtgagcttttgcgtttctgattcccaagccctgagaaagagtaaacactcaaatgttagtgaaatgtacagtttgatatcaagagcctctagatatattaattagaacctgatgagaacaaatctgctttgaagaaagcgcccaggaaagagattccctggcttctagtagtcaccaagccttaggttccctccctccactctccctgccctatcggcactaggttatcacccacccagtgtttcactgtgtgcatatatgcagagatgatgtgagacacatgtcatacactgcttatagaaatggtgccctccacctcaactctgccctattccaacagggaagagagagtgctaggagagagggaactgcccactgcccagcttgtttgggttattcagaaacattacagttaaaaatgaagtataatgtagtaatggaactgcaacacacggtattttatggactaattttccgtcatcacttctttatgcccttttcctcttaaatatagtactttgaaaacaggattacaacacactaagagccaaaaggtattttctttcagcggttgtcagggactaccttccaggagtttaatttagggcaccccactgagaaacctgcatcaggatttcaaatgagattaaaaaaaagaagaagaagaagaagaagcttttgcttaattctgctttagaatacagccttgcaaaacttgctttccaaaaaccatcagcaaagtaaattttttcctacatgcaatttacctttttttcacatcagatcagttgaggggagggggctgtagacccagaaacacggggaggatgaggggccagcagtgagacctgctaattactgatctcttttactctcctgctgtgcttaactgtccggacatgttaaagtgaaatttttctgtgatttttcaagtgattagttcatggcccgctagcatggagggaagcagaagagatgaaatgctttcgtttacatgcaacatttactaactgtgagggttttccgacattaaagagaggacagtgacccaggccacctttttcacactcaaaagggcactgaaaaaacaagtcttcatcggcttacctcaggcttccctggtcctgaacaccctccccccggggtatgagcagaaagggaaaaaaagaggggattttatgctcctttctcttcaacttttcaggcggtataagcagcatttagcaaattcagcctcaaatggctccaaatgctcggagctgcaggggctcattctttgttatcctccctctatttacacaggatttacgcaggctctccactgaagagaccgaaagcacttccattctcactggcttggccagcccagactgtggctgctgcagctccacgctggcctgtgatgggagatttctacaacctggagaaggcaacaaactgctcactaactcagtgatcccgagacaacctggctggtacaggcagctgcaaagcagacaggcctgcagagatgagctaaccttccagaagagaaaggaaaacccagccaaggctgtgcaaatgtgcgtccagagacaaataacatgcactttaaaatatgcatctatatgatataatggaaagtggtgggtgaaaaaaaaaattcagactgcagcttggatgaaaaccacttcacccactggttggaaaaataaagtgtaaaaacagacagatggacacatatgtaaatgtggctgtgttttaggctttagctggcaatgtgagtgtcgtagtatagttttgcacgcctgtattttccatatcatgttgaatcctgttaactgttgaacagaaacatcctcatactggtccttgaccaaatcagtcccctcaatttacccgttaggaaccataaaatggctttgtttattgactggaacagtctaatcctttatagcagaagagaatgaaagcttccaacacttttagcctattcttcactaaatgtggttattctcgtttaaaaaatatatatatatatatatatttaattcattgtcatttgaaatatatatatatattgcttaccaattttaaaatatttaagaaaggatctctgttctcctaagtctcccattgaattctctaaaggatactgactgaccctagtagaaaagtacattcctctgccattataattcagcagattgcttaatctctgtggtgcaggataaaagaatgtacttgttactcagttacctgataagcacatataaaagtacagagtatgttctgaagttattcacagtacatcataataaagctcttctgggcactctaatgattcatttttagtgatctctcaaatgcccttttccacagttaacactcatattttattaaggtagaaggcagggacaaatgtccactcaagtcccagctctcaaatttgactcaacttgcactacactacctagagctaaagctttttttaatgttctgttcacctccctagagtggcatttcagctaacagagttcacaatccttcagccctaaacacagaaggctgctatcttcaagtcatcctaggaatgtgccagataccatcatttccctcctgtgatacaaagaaccagaaagggagagagaccaagagaagaccaacctgatcaagttaccaagagcccagaatgcccctctcaggaggttaatctttgaactggtaaatgttataattaggagccttgaagttgggctgaggctggccattgaaataaagaccctaaaagagaaagtatgaatggatcccatctctttcacctaatagtttgacacaacggtcatggtttttatggaaaattatacaaaaatgagttgttatgatatatgagtctcattctcacatctcctacagaagaaaaaaggtggtcggagggatgtgtcttcccaatttcacttagctatgtttcagtacaaattgtgaaaattatgcaaataacaattttggcacctttgctagaggaaaacattattaaattatgctctaagtattttgtctgctttagtaattactctcatgtaactgtaaatataaatagctgttattctgtttaaatttttaatcatgcaaaatattgtcacacaaaatgtccttctgttgcagtctaactgggattttcttttttaaaatatccatatttaactgaagtggactatttttagcgttgtgaagtgttttagtaaagatagctggctaacatctctgaatcaacaggtctttcaaggaaagatatggcctttatatttgcaaaaagaatttcctacaaaaggccgtttatataaaacacatttttaacattttaaactaaaactagaatataattagtctgcttccaaaaatgtattaactacatcaaacctatactatatgttttagtatagatcaataataactataggattttctaacttattgtctcttttatcatactttaatattaaatgaaacattaaatgtcagctaagtatttatcaataataaaatttgttggaagaaataacaaaaaagcaaagttctatctgtaacagaaattatttcattccatttttaagagtccttacttcattatcaaatttgctatctaaaacaaaaataagacaatacatttttataacataaaatggttgatcagttttaattcctaagatgatattgctctgtgaatttatatcagcagatataatttcaaagagcagaacaacaaaaacgaaggttttttgaatatttcttccactttgccaactattgtaaaatgaaaacaaaagaatattttaataaaagtgtaacttcgaaactttgaaagttagtgtgaaaaaaacccacaataactctttatcttaaaagatagccgtctctataataataatgttaactaagataactagttagagatatgtatcaacatgccctttatgaagtttttaggaagctagtgatagttacctatagaaaaaatgaacaatagtattatggagttgatgactggttttaggtgaatactttttaaaccattaacacaccaaatttggaacatatttgttagctattagaaaactatattttgaacattttttcaaagaacattttcatacaatagagtttcctaatcaaactttgaatttttgtttaagaagtttataaattaaattgctagcactttaaaagtaaagtgatgcattcagatattccattatgatgattgctttaaataaatgtagtgccattatttgagaccaagcagatatgtttttgtaatagaatgcaaatgaatatctacaacatacacataatagccctagagaaacaaatactgtgtggctgcttaataagaataatctaggatagcacaagttgatcattcttcgtatagcctatacaggaaagaacagcagacactgaggccctataaagtacatggaaaatggaaaatgactgctaatgggtgtgaggtttcttttggggtgatgaaaatgtcctaaaatcggctgtgttgatgattgaacaactttgtgaatatattaaaaccactgaattataagcttttaagggatgaattgcataatatgtgaattatatctcaataaagttgtggttttgttttttttgtttttgtttttgtttttgttttttttggagacagagtctcactctgtctcccaggccggagtgtagtggctcaatctcggctcattgcaacctccgcctcttgggttcaagcaattcttgtgcctcagcctcccgagtagctgggactactggtgtgcgccaccatgcctggctaattttttgtatttttagtacagatggggcttcatcacgatggtcatgctggtctcgaactcctgagctcaggcaattcatgcacctcggctcccagtgtgctgggattacaggcgtgagccaccgcagctggccttttttttttttttaagaccagattttggcctcccactacaaataagcatgctggaagaaatgtaaaagcctagtagttgaacttgaaggtatccataattttttctgaattgcttcaaacaatgtgatttcaaggccacttactaatcttgtcttagcaccttgtgtatggacaaatatatgtacttgaaaaatttgcaatagatattatgctgcttatattacaaagatatgcattatagaatatattacaaagatatgcattatagaacatatattgactttcatactaaaattaatccttctccactctcaattctattgcatcacagcaaaaccctagcccaaatatttgctcttccaaggcttacattaacactcagaactccagaatacttccacaaacagatacacacacacacatcccacatcccatgcctacatttctacccaattattgaaagctccttcaagtcaaaaaccatatctctttttctcatattcttagaacttcatatatgttatgggtatagtttgtgcctaggcttttattaaatgaatggatggagggctctcttatttcttgaaatatgcttttatgccttgtgggtttatatctaaaacttggaaacagaaactatctagaatgtttgtctctaagaggtgtaaattggccatagagttgacgtgtcataaatttcaaaggcattaacttgtaagatacactccatggaagaagcaactttattgaaacagacaatagagaacaggggccctaaattaggaagagtatccgacatacttttctaaatatctgacatttttctatttctctgggcagttgtactactttgtttgtacactggagactggcttctgatgcagtccttgtccctccaccctgcccctccactccctcctcacataaacacagaagcacgtactcatggggggaaatggtgatgtgatggaagaagcatgagttttggaataaaacagatcttgtgttgaattttcagatctatttcttatttatatttgttaagactagtcaaagtgaaagagtgtgagtgaagaagaaatgaagaaacctgtgactggttttaatcaattagttgtaaacaccactgcacttggaccagccccagatctattccttattggttgagtatgacctcagtcaaaagattaaccctctgaacctcagtttcctcatctgtgaaacgggaaaaattacatatacctgacaggttaaccataaaaattaaatgaaatcatgagagaaagagctattacttatattgtgtccccactttgtacccaatgctttatacttattaacaaacttaaggacttcatacacaacatctagcctcatgtagtacctgaaatagcaaaggtgcatcaataaatgttagttatttcttttcttaaaacaaaccagtttgagtggataaacaaactgtggtatatccacacactgaaatactactcagcaacagaaaggaataaactactgatacccccagcatggtacattttgaaatcatgctaaatggagaaagccacacgcaaaaggccacatactgtatgatttcaaatatattaaattctagaaaatgcaaacttatacataatgaccaaaagcagatcagtggttacttgaggacatatatagagggagggagtgattaaaaggagtgtaaggaaattttggcgtaatgatggaatcgtgtagtatcttgattatggtgctggtctcgtgagtgtatacaactgccaaaacttattaaattgtacactttaaatgggtgcaatttttgtatgtaaattatacctcagtaaagttcataaaaataataagcaaagtacagttaaatcatcaaaaacctgttatttggcataaaacacattttggtggaaagtacagcattcaatacagagatgctgtagtgggaattctcccagtaactgcagcaaagttctggatgatttggggcagcatttgaaagaagctgtgaggagaagctcaacataatatttatgaatgtgttgatttatataattttctttaacttcataaagatgtaaggtgggtggtcagaatgcacttggcagattttacaaaaaatatctccattgttcaaatgtcattataagatatattgttaacgaagaactatccaagttgcaaaaaaaaaataccgataataactttgaaagataataaaagtaattcttaataaattgctttttaaaactttcaggaaattcagtcttaacccattccttctaagtaaaatatctcacaccacactggagatcttagacaatttcagaggaaaaccacatcattcatgaaagactgagcactctcaagattaagaattaatggaaaatacagaaataatattagcccttgccagcctgctccatgccttcagataaatccctgaatccaccatataaggatgaaatggaagtaacatttgtggactgtctactacatgccagtttcagcaggctgtatctcaaccacaggacagttcagagtttggtagtgtaattcctatttaatataagcagaaactgaagccagacaggttaagaaactcgcctaaagtcacgtggctagttggtaatgcagctgggtcttgaactctaaatcctgaactcaagtccatgctctctactcaccacacagactctattcttacacagaaatggaattcatatttttaaagggtgggtgaaaggtggggcaaacaatgccttatggctttgaacctggataagcagtcacttactatcggccaattatggccaagtgatccatctgacttttgagatgtgtgatatttggcacatattagataatcgataaaggttagttccattccattctctttttccttccttctttcacttattcgaaagacccattcacataagaaaaatgaaaatagagtcaccgctggttgaaaaacacatttgctttataaaaatatcttcttccttattcttccgaaactcatatctcaaaacggcacaaaagcaaagggtcacgtgtgctactacttaagtgggaaacattttcatacctgattgtcatccatctttttctcctagaaaggtgaggagctgaaagccatgtaattattagtttgccaagacatatccccattctgccatgaagaaagacaactcgaagggcaccaacacggctttattcagatcctgttagctaataaaacaggaactgtaaaggtttttgtttgagaggaaaagttgttcaaccttttcccaggaaagaaaggaaggggtttgctttctcagtaggtttattcatatacctgtggtaaaccagcctatgagagaagtaacatctttgctgtaagatcagacctaagagctaccaatcaaatagcagtccaaccttaatatgctgatacagcaaatttccggatcttgatcacactaggctagggagtcattcttctcagtgataaagttggcgaatgcactcttgagaagataacaaattaaaaaccggctgactcgacaccatttgagtgaggaattcaccgctgacccagtagaacacaatttctaccaccagtcagtaatcactggagaggggccaacttcacttcatagctgtaaaactattcctaacagagggtcttggcacacttaaaacataactgtccgatttaccttatgcacatctactgaagttggtaatgacttcctcaactatttatattctgagtcatactgtgtgtgaaggttcaaagattctcaagcaaatttcccaaaactgctgtattatttgggagaaaaaattctcccaaaagtgctgtattatttaaatgataaaaaatgtgaaaacaactatataaccaagagaatgttttcattttgaaaatatattttaaaatctatagaatttccactaaaatatctagtttttctatatatatgatgggaaatgaagttgatatcctctatacatcaaccacaagacatgatagggagataactattggattagttattgtgagacttatgttctaaactttgaaacatgtgatcttggataaaaatgcctcatatctatataataatttttcagctgtcaaataattcttttcaattattgattaccacaaccaagtgtaggggcatagactgttatccgcatttaacagataaagcgagtgaggtcaaagttttcctaacttcttgccttgcctgtagcactttccattacttatggcgtatgataatattaggctgaaccagctgaaatcactaatatttgactttttgatctaccaaaatggcaattccataaagcattatttccagctttactagcaattgtaataaggcttttcttttgctttttctatttttcaatttgcttgttttttatgtctagcctcactctcacaatctccctcaattacattctctttctgtattgaccagatgaaaaagataaagtagaaataaattctaaaaatggaagccctgacctatgagaggccagtgattttacacacagaaaacttgccaatgaaaaatcaggaggtggggagactttgcatgtttttaattgtgttttgttttgttttgttttgttttttgagacaggatctctgttgcccaggctggactgccgtggaatgatcacggcttaccacagcctcaacttcccaggcttaagcgatccacccacctcagccccctgaatagctgggactacaggcatgtgccaccacacccagctgatttttaaaatgtttctgtagcgatggcgtctccctatattgcccaggcttgtctccaacttgtgagctcaagcgattctcctgtctcaacctcccaaagtgctaagattataggctgagccaccgtgcccagcataactttgtgtgtttttaaagagggatgtagaaagaagcctgtttgtgatatttagaaaaaggaagtattcctgtcaattctaatttcaaatttcaacagcagtaattagcattgagaaatgattagcgtacattctattatatgccgctagagaaattttcactctaagtgttttctagaataacgacagcattaatacaaaataatatttattgagcacttactctcttccagacactctgctaaacactttatatgaattcctttgtttaattctcatcatcctatgagagttgacattttccacatgaagaaactaaggcttagagaggtggagcaatttgcccaaggtcttataggtaacagtgcagaaacagggatgacaccaattgactgcatcctatgatggctatctctgagagctcagagtccatctgtccagaatttcccattctcctataaaacctcataacatttctataccctattgagtaattcatgccaagattttgtggttgatcaacttaagacaataggaaatatacattcgactatgaacgtaagcatcctggggacaggcactggggttttcctatccctccttactcctagcacatagaacagtgcctggcacatcataggcactgatgaaatacttgttagaaataaaataaatataattcttccctgtgtgtgtgtgtttttccccccacttcctagagcctcactttcaactgttttcctcatgagaatgtggagagctctcaacattaaacaacattactcgacttcggaaaccttccaccactgccacagccaccaccaccttcaaccttgctgtaagcagtaaaattgattcatctcactgacaaaaatgtgataaaagaacgccaaccacagaggtggagaaaccactccttctccttgaacaaatgctgctttctgatgcccctgattgcttttcttttctcgctaaggttcactaagtacggaaagctcggccctggtgaatatgggtcaggtttgtaatgcaacaactccacccctttcattaccatggaatcagttaacaatcctgctagttctaccacaaaaaataaagtaattggtcccagtggttatttaggtgctgcggaagtcttaaaaacactattatctcccgtagtgatttgctagcctttccatactccaagcagcacattgggacttctaaattacataccataattgacataaaatatctgtcccatcagtgaatatctttattagcatcaaaatcactcacaactagtgttcctcaatgttattaaacataacttgttctaggtgttgctttactaattagtcaggatgagcccgaggaagaaaatctgggtcatgttaaattaattggaatgagcatgaaaattagcagagcaaactgcatcaattttctatagagagtctttcttcatgttgagaataaaaatggatattatgaggcattaaccaaactgccttctgtgactgccaagaggtgtgttacagtagcccaaaatatcatgctcgcagattttcagaagttaatgagacatttccaggaatggtaaatacatggtgttaaaatgggtgtgcctctgatgggaaaatgccaagtcatttcatgtttattcaggcataacaagctcttcaaaatgagcataatttaagaggtgaatagtgcaaagagggctaacattcaactaattttccttcagaaagaaaagattaaattgaacaaaaaaaatgaattaagaggtttacaaatcaacaagtcagccaccaggacggcagcttcgcctgagcaccggctcggcagcccccgccagaaagttttcgaaacatgtcccggaggcagggaacaaagcgagcagaactgattacagccccgctcactgccttgtgtctcaactctgtttggcttcctaatgagctcactaaaaacctaattcatctcccataaccctcctcagccctccttgaaatccaccattatggaaattatagatgaaacatttccaggctgggttcaaaccagtgtgtcttcaacaggcgggggccctgacccccaccctgggcacaatggagcagggtccagctccgaaccgctcccgcggcagcttccagaataaagaggccgagctaggttaagactctttctcagggtgacaatgatttccgccttaacgccctccctcccatgaatgtgggaatttcgtgggttccacagtacataaaatacaaattgtaatgcagaagaggagaaatgagttgtactaatgacaaatagctgaaacaggctaatgtgaattcccagcctgttcatgaggaaactccccgggttcctcattacatggagtcaaatcctcacggcacctagcctgtaactggaagattaccgaattgatggatccttagtttaaaatgcagctgttttattctgctttagtaattaattctttttccaatactctattgattaagcgtagaccctgataaagttcaaactgagaagaatctctcgtggcgtccttagttgctcgggagagtcaatgaaaacttcctacaattccacctgcctcctcagagtgctgatccaatgaacagaacagtttttttctcataaattagtcaggccatgtggagctgtattagctgatcgttgcttttgtctctctacttgctgacttgcttttcagttttgctggcctttgtgctgtcacacacaaagtcggagtgcagctgccattctgaacccaaaccaaggtaaagaacaattcatacaaactacatttttcccccattttctaaagcggcaactccctgagcagtaaagggctcaacggggcctcctgggacccaactagctgagaaatcagtgccaaagcatgcagacatattgtggaactgaaaaaataaataaataaataaataaagtaacctatttttttcaaggctttactaggcttttttgtcttttttccccccggtagagtttgtgctaccctattttcagcaatgttaagctctctactttgttttcacagagaacatcacagaatgacagacgacagggtaaagagagtaatcaagaagccgaggcttgtatcctgtgctggtcaggtggcatcagagagttagagaacgcctattaaccacacgggcgtggagtgtaaccatatataaatggccattataaacacaatggtatttagtaataagaggaatcaccaacatggtgcttcttttcaaagggtcacatgtaccggggatcaatgttggtgagtaaaacaagcacgataacagaaagtttctcaggttacagccctgtacaatggatttttgttcctacgaagatcatcgctactgggaatgcttctacagcaatggactcattcttttctccctactccccccacacccacctaaggcccccaaaggatcgtgcatgggcttaattccctgcctgaaaacaggtcaagatgtgggttccagcccacgagctggtagggagaacaactgatttctcaagtcacctgcaacacacatttataggataactcatattatttttcactctattacacagggtgggagtaatagtaaaggtctggaagaattttaggaaacgctctcaagtttttatcgtctgatactacagtcaaagcgaaaaccaagctagatcctgtgagcagagaagctggggctgttttcaacgttctctcctgggccagggctgagagtacattcccaccttcacagcattccttcctaggtcaaaaggtcatctctcacagacgtctccggcagacactcagttgtcaaaaggttgtatcatgtgatctgtgcagtcaccactaacagagctctttcctcagtgggcaacaaactttgcaggtctaaatgatttctgcattaaaaatgtgttttcctctttctattaccacttgtctctttaatttcaaaacaatgaggacagcagtggcaccaaattcatcagcaaaggctccacagatcacctgggtcaagattccaccacttttactgggcatattatgaggaaaaataactgccagaggacatgttgatttcctgcatttccaaagaaaacagaggtgacccttttccaggggatttctttcaaaaggaaaaccccatttttaaagcaaacatacatattttgaataaatacaaaattacaaatagaaaaaaatgatctaaaagaaaagactgttctgtaagaatcattaaaaaattaagataactttttgattaatgcatatattcacttgtatttaaatgaccaacaatctacatagtttatgacaaggtacaaaaacaaaaacgaggagataagtttatttgcccagtgcccagaactgatgcaaagtttgccctcagtgatctgtaacacacaaaaggtcccagttactaggggagcagactgcttttttatttttttaatttcctgctgcccagatgaataatataacaattttctcattgtcgtggattgttacttagagcagcttgaagctctcacatgcaatccagaatgagtcatttatttctagaagggagtcaaacgagtctatcaacattgcttctatttataaattatatatttaagagtaaagtaaaatagtcatggctgacatgttacatatgggagataaagaattacaggctctttcaaattatttggcctagtactaagcaatagaagctaaggacactgataatttctgtacagctaagcattacgtgcacttgtttattcaaaaaagcttaattaaatagcctcagaaatgggatccaagttattacatgtctttaggatactgaggcttgcagataaataaaattttcctaagtgtactgccttcttttttttttttaattaaaaaatgtacttttaggcaaggtgtgatggcttatgcttgtgatcccagcacttcggaaggctgaggtgggtgaatcagttgaggccaggagttagagaccagcctggtcgacacaatgaaactccatctctactaaaaatacaaacataaattagctgggtgtggtggcacacacctgtggtcccagctactcaggaggctgaggcaagagaatcgcttgcgcctgggaggtggaggttgcagtttgctgagatcatgccactgcactccagcgagagtctgtctcaaaaaaaaaaattctttttttagaaacagggtctcacgctgtcacgcaggctggagggcagtggcatgatcatagctcactgcagcctccatgagctatgatacggtcctcaagtgatcttcctgtctcagcctctcaagtaactagggctacaggtgcatgccaccatgcctgactaattttttaaatattttgtagagctgggggtcttgccatgttgcccagactagtcttgaactcctggcctcaagtgattctcccatctcagcctcccaaagcactgggattacaggcatgagcaaactctctaagagttacatttttcaaaattcattttgggcttcaacataccaccttttagctaccttggattaacaggaactgacaaaaatacatattcttaagaaagtatatagttttgtttggtgtaatctacaaactttaaggtctctggttctacacacttttcttagggtaggtatttcagtgttctacaaaccgtatcatggagtgttcaattaagcacatattctacattgacactttagttccaggaagttatcgtgtaccaccatatttgccagtttagtatctgtaacccctgaacgtgtgctctatacgtttcatggggtgtttggaaggtaattgaaaataaaaaattatgacacagactcaaaaagaaaaaaaaactacatgagagaagaaattggtttctgaacttttcaaataagactgggtgggacccagctaaacaaggtgaataaaacacatgtttatgatctcgtaatgattctaagctcatcaccatttctgttactgtgaatctgatgcttggcatttggcatcagctacagagtgcagggattcggtacaattctaacaattgtagagaatggccctaaaaataagaacttgtgggctggaatcatgttttatctgccaagggaatctgggaaggaaaacaggtgtttaataatgaagtggtatgaatttaattatcatctactttgagggtatcacacacttggcagccttatcaatcaaggaaggaaattaatgaaaaagttaagaactctctacagagaatacatgatgcagttagtaattttaaataggcatggttaggtcctgtacagatttgtatctgatcctcttagggggtgcggctacccaaggctgcatttttcatcctgtggtattaccttacctgaatataggactccagctctagatatcccatctataaagtcaaaataaaccttctcactgggtgcacacaaatattcttctaactgtagcaatgaagaaggggtcaaacagacggaagatggggattaaagggattgggatgccttcttgaaaggcatcatgttaaagtgctgcaatataccaggtgccctaagagaaggtcatcgaggccggcagaagtgtttaagggcagagatagctaattaaatttcacccaggaaacagactagtttctataatccataaaatactatacaaaacaatgactgcactcgtatttataaaatatctttaacatataggtctttagggtaaaatcaccaaactactaagatgagggtttgtagttgcagaggtagccgcactaaaaatttacacattaagaatatcttcagaagcagctggttgccatgtctaccttgttaagtcattcattagggacttgagctagcataaaatctttcaatacttgcctttaacactttaaaaaatcctaaatgacaaaattatttctttgaaataaattataaaaggaggcaggaattctggacttttggggagatggttgtagaaactaagatttacagtcaccaaacgagtttttctgaaacttttcagaagtatagcatttcctcttaactttcaaaatctggatatcttcctataaataaaatggcagccataaaacatcttaaaataacttttcaaaaaatcttaaaactgtttgaaaaaagcaagcaggatattttaaaaattaatataatttaaaaatttcaaaataaaatgttttatttcttcaagtaaatgtcttaggggaaattatagctagaccagaacttggagctcctgacacactagtgtcagtcatcagctcagaagcctactaaaggttttcacgctgcctgaggagcaacaagttataataaaagactcaagaactttccacagattcaggtgcccaggtaaggcagtgtgacccatgactcacagctctctgatctccaggccaatactctttgcatgtggcactaacttgacaagctagtcctccctcttactgatgcccttggcataatttcaatgcccagcctaggaacagcaggggcctaagtatcattacagtgtgacagattctgacttgttttcttagagaaaaagaaggattgctaaagtaggccaagaaaatcatttgtgaatgtccctccttctatgtcaaaacttgtaataagcagtagaaatcaataaagttttagttgcaaaaacataaggccacagaagggatggtatactccaaggatgtagtcaaagagacagaaggagagatctttcacaaagaagacggaaacgtacaactttactgtcttcttgctttgtcagtgatcttgtcctacgatcatggagattgaacaggccaatatttaaatcaaaacaaatatccatgctcatcctctacaacttcccaggagaaattccaatcagatccttcacaaattctaattttatcctagtgagggcaactgtatggcatcaaatttacatataaggacccctgaagaatttaaccaaatttaccttcttctgttgaattctgttatgtgccatatgtttttggaatgtatttttaaaaattggaaaccagtgatttctgtgccttaatcatcatcctgttcatcaagatcagtagcttagaaaactttgttcacttgacacttgaaatgatgtcagagaaatgttcatcttcaaggatggggtaagacgtctcttcagtatggcaattccaaactatcagtaattttctaaaaccatatatggcattacaagcctgtcaccaaatcaatacttacagggtggatttttagaaaagagctgatctccgttaccattatgacctagaaagcatcaaaacaactttactgaaatgtccaggcatatgatagaaaataccaaaacccacctgaagctttcagaatgagggaacatctctagcccatattttaggtctgacaacaggtatctaagagcattttgttttttcttttagagataaggtctcactatgttgctcagggtggacgcaaacttctggcctcaggtgatcttcctgcctcagcctcccaaatagatgggattactggcgtgcactactgtgcaggactgctaggtatccgacatcatttgacaacttttcttgcagacagggtgtggtaccctggttaagtgtctggatttagggattagatagacctgatttacaatcttagccccaccactttctagatattccaggtaaagggaagtttcttagtctctctaagcctcagttttcccaactgaaaaacccacacaagcttatgaggattaaattatactaaacgtacagcacaatgttgggcatagagtagctgtcaagcattagctataataatgatgataatcttgctattgctgccatatttgggtatacatatcataggtacttttccttgatctagcacttttttctgtctatcaatggtaataatcaaatagaactgagtctcagattacgataaagctagtatctggaaagatggtgattgaattccagatggcactctttaaaatttttaaacaagaaattagttcacatatcacattagcttttctccttcctaatagcatatgacactataaagaagccatgaaaaatgaactaatataaagagaaaatatttcttcaccaatgggtgttaagctgcaagatctgtgttgaaattcttgcttaagtcaaacagttcttaggctagaactggtcaagatttgaaacaaaacgatttttttgtcccatatatgaaaaacttgatcagaaggattttatggtgggttaagtaatgatatgcgaagacagcatttagtctgtaaaagcaaaaactaaatagaacttaaggtccagtgataacttacacattatctcaaccaaaataaaataacatattttaaaacttaagatatcaaaagagagaaaatacctcatttgtgtctccatacaatatatcaactaaatagaaaactaggaaattaaagacatctgtgtacatatccacttattttcaggacagaaagcaaaccagcaatgcagatactacgttagtatataatgctgataagaaatctctattttttctatttttcttttgtatatttacataaaaacatatttacaacgtaaatatgtagtaatatatatgaccccaattgtaaacaaaaaaccatatcacttataaaagtttaaaataaaaaggacattatgaataatattagcaatccttacagcaaatgatacaataaaacatatttgcacaggcaaagtgaattgattagttacatttaggctaatttcttactgctatgcaaaatggaatactatttttgattttcattagtcaaaataattgaataattggtcaactttcaaattaattttaactgtgtagacaccatcgacattgtcctagaacttgagcaaaggaaggttataagaacacttacgcatgggaaaatggattggattggagtatcaaaagccattgtctttaagaaatcctgaaactctataggttttaagaaagtcaggattaacttctctttaaaccacaaacccaatccagtgagtaaaaatcaacaaacaactacaacatttctaaagagggaataaattatctattgtctggtatcatttcttaggcaactaattcccattgaaatgttgagccaaagataactagatattttcaaaatgtgctttttagatctttagcacagaaaactttgaacataggatactacgtgattttgaaattatgctgaaatatcattctcattcctatgatcactcatgatgtaatatttttcagaagttttcaagatcaggtcaactagagattagaagtacttacatagtctcaattcaaagtatgccctttcaaaagtgcataatgtaaattctggaagcccttaggtaggtggcagtttaagcactttatatagtgaactgctggcaatgaaatgtaaggtcacaacatctagacatgtggcttcatgcttttgacactactataggcactgagatacatttctggagatttgtcaggaacaaccctggaagtcaagaactaaagagagtgtcaagaaattctttagaggaaaaatactgccaaagagttgagaaagccctgattggctcttttttattttgtagtggggcaaaaataactctctcagaatactgaggatacctttaagtaatttcggagctctgaagaatttgaacaacacgtgtgactgacaactgtggtttgaatactgcagaagcacctttcaattaaagagtgtggttttattttactgcttcaatatttcaagccagataaaaacaagatgctaagccaatttataacaaaaaagaaatcaacttggcttaatttttaaagcccatctagagaacacttccagtaggttacagaggtgattaagcggtgttggtgagcaaatttaaaagaaaattgaaatgagcagctttgagaaagtccttttttattcacacaaaaatatcttttaaaaacccacgatataaaatattcactaactcttcagttttttgatccagttgaatgtgttactaatggaattggcagactttcttggggtagcagatcttattattcccaaagtcagtggaggtttgatgcaaagagcaaatgctaaaacacaaataagcatttttacttatatataagttgatgactatgacataggagttttggaaagtcccacaagagaagtagtctcattatcttagccttcagcacctcttgtattctttgccatttctaagaacaaggagaagataactaaccctttagaattgccaatttaatttctaatggctctcttttctaatcaaagtgaccctatggatctaaccaatataaattggaaaaataaaaaaaattggtttttcaaagtgtaaatcactgatttaaaaaatcactagcaagaggcttatgatggctcaggctccagtttaacttgaagaaataaaaataaagggttgtaataaagaaataatagaagcgtggcagccttttgattagagaaatgacatgagggttttaatgactttctcaggacagtcacttgccttaattaaattttacatcatttgtgaactgaataccttttatgcaaaaggtaaagaacaagaaaattttaaatggctttgtcttcattcttctgcttcctctttctatcgtgacagtcaagtaactgaccctctccaaggccaagccacttcatctggaaaatggggataaatctgaaaaattctgggggaatcaaacaaaaatttatgtaaaaatgcattagaaacctacattaagaaaggtaacactaaatatacagtattcctttgcagacataacttgagttttaaataatatcatttgaaaagtaatagatacagcatgctagagttggagaaaacttagaaatcccctaacatcctaatcacacagaaatgtgagtccatgagagcttaaagagataatgatagtattaagagcaactaactttattttttgtagagatgtggtctcactctgttgcccaggctggagtgcagtggtgtgatcatagctcatagcaacctcaaactcctggttgatcaagggatcctcctgcctcagtctcctgaagagctgggactataggtgcatgccattgtgcccagctaacttttttgttttttttgtagagatggggtcttgctttgttgcccagcctagtctcgaatacctggctttaagtgattcacctgctttggcctcccaaagttctgggattacatgagtcaccatgcccagccagcaactaactctttttttttttttttttttgagatagggtgtcactctgtcacccaggctggagtgcagtggcatgatctcggctcactgcaacctccatctcctgggctcaagcgatccttctgtctcagcctcccaagcagctgtgattacaggtgtgcaccatcatgtctggctaatttttgtattttttgtagagacagggtttcaccacgttgtccagactgcagtaactaatttttaacagatggttataacgtgccaggtatacattatcaccttatgccttccaccaaattcctttacaaggtaaaagcctagtttataggtagtaaagaatggaaccttgcccaggctctcccacccttatgtctgagcccataacctccaggcctcctaaagctgtcccacgtcatacctccaactgaattggggctaactagaaggcccacattcagactctggtctgctgagctcactttcttctggtctttaggcagaaaacagaaatcagaaattaaaaaaaaaaaaaaattagaatgggacagcatttgactgagtaccaaaccatggtacacaggaaactgagaattttgacctcatacttctcccagatttgaagccttttcctgagactccttctgctccaaaccctgcccatgtttgtatgtctgtgttataaaacaaacaaacaaaaaacagaagaaaatagagaaagaaagtgtcttgagctattgttctcttgttttaagaaatcatattatactgtatcctgaaatagaaatttacagaaagtgataagtgatgtgggcttaaagttcaagctatggaaccaaaactaataaagccggtggtcacatgcatattattatcacttaattgctattattattattcacatttatggagcatattgtattatagatgcccaacccagcacatagatcttcaaatatattatctaatttcattctcacaccatttctatgagacaggcatggttaactccattttagaaatgaggaaatttaggcttcgaagaattaaatcagtcaccagaggtcacattgcatgtgggagtcagaattcagacttaggtctaacttcaaatttcatgctcttaagaacaaagttatgagcatttgagttttgaattataatctctctataaagtgtggaatcacttcccttaagtttgcaggagttggaggaatctcaagccatgactttgtatcctgctttcttctacctatgactactcaattctacctaataaatgcatcacagatttggtgactgacgctttgacaaactcaacaaattttgggagtgctaacatccctaatgaggaacgaaaccctatgtcaatgctagcaaattctaagttgtcacaaattactagctattaaccaatcgtcaaattgcaacaatttattcaaccaatgtgtatttatcacaaactaagcactgagcactccgcactcattatgagggtgctacacagagctgacctacaaaataagcactagatgagtggccctccataatcaagattgatttttcaattcttgttttccttacctcctactggcaagtgtaccataaaaactaagcaaatgttactagacaacatgactagaaagaggtcaggtttaagtaaaatcttttttttttaggagttacctccatgcacatgaaaaagttaagtcacagcttcagagattactgtctctagggtagagatgttatataaggtaggaagacgtccatgaacttcattttccactttcactatctgcctacaaagcagcaggtttcaaggtccctatcaatgttcaaagggaagcttctgtgatatttctgcattaaatgcccaacatttagtataacataccaatgtataaaagtaccaatttttcctctaatttttaaaaagtctgacacattatttttgctgtaattttacgttagccagggcccaatttctttttttcttttttgccagctgaaagcaactcatattttatactggcagaaaatgagcatctagaattccttttagaacaagaaatagagagaaaactctcatccatttagtggctaataactatgctaggatatgtagtgcatgtgtgtagaaacatcagtctggttggataaagaagagaaattctgtttctactctcagttttttaaggtgattgatgatgttaaaggtcactgattctcccaatatgtctatgttcctatgtataaaataggaagaacattctttagaggtattgcagttttctgagctaactgctatgaagcgttcaaaatcttgcagaaagtctcttgacaaacaagacaaaatcaactttttctcatcatatggcaaagatagtcttaactgtaccacaagcctcttcttggtcatttcaaaattggagagacaaggtatacccagcctaattctccttcccacagccaaaagggggtgtgacacatccaagtgggcaatccccccacacattactgaggggtagaatgtaggaatgcagaagagtttcacctcacttgataaccaagagggactgtaattctagacctcctgaatgccccgatcatgacaaaaataccttctgggatcctccaacaataagagagtcagcgaaaaatttatggacagtagatgcaacacccatcagtggcaaccagttctaatatttgctaaaccagagatctaggacagtgagatgtagacaaggtggggttttgcagctgtttcccagaaatttcccatgggtggacagtatatccagtccattgctcaccacctgcagcaagcagaaccaagccatccactccaaatgaggaaagattgttgttttctcacctccttcctctttcatggatttgccacccaacctccaactcaatggccgcttaaaaaaaaatgcatcaagctagttgttaatacaattcatgtcaagagtaaaagtctgctgggatcctcatttatacattttagagggtgtaaccaaatgtgcttacttttaatgaaacactcaagggatattcaaggcacattgtttgattaatacaatgaagaataactacatggagagctgggttaatggaacattctgcacaagtatagtggaagtccatgagacttctgaatataaaggaagttatttttacacaattacaattgaaaattgatcctgagcccatgctgacccacctcttaaaaacaagatgcaggaagactccctacaaaattaaactctatccaaaggtacttcaatgagagaagcagagtcccggaccacattttccagagtgtgttctgagaaagactggcccccagagataatgcataaaagcgtttcaatggttaaatgagtctggaaagctctgtctctccacactttgcagacttgaaatgcatattagcaaattaggggatctgaacattcctgtagcagaggataccctgctctactgcagctttcaatctatttaaccacaaagttcttttttgtttctgtttgtttgttcatttaaagtaatgcctatttaaatattcttggaaccatagttttctaaatattgaagaagatatatttactcaatcctgttaagtcatccctaggtgttaataattgcaacaatgctaaaaaaatttataaaaatgtgcccttgtgccctgtctacaagtttctagaatggtgtcacatacatgggatctaaggaatcacaataatttaagtgcctaaagtactttagagagaatgtcaaagctttattttttttaaagagctatttgaaatttgcttcttccctcaaaagaatatccagtctttcaaacaggccgtatttcagggaagcatacgggtctgctattttgaccatggaggacatagcagagaatttgtcattggtattcaaaaggaaggcaattatgtcactacccccattcaaaattgttcaataggtccctattacctagcaaatcaagcacaaactccccagtctgctattcaatgtccttcacaatatggacccaatcttcctttcaaaaaaaaataattattattgaaggcctcctatattattgtagcacagtgggggctagaagagggaggagatgcctaaaacatagaaactgtcctcaagaatcttacagtcaagcaagataataagtaagtcatgtaaccaattactgtagcaccaggggaacctcgtgtgtccgaaatgtgtaatcagacttcagaggaaaagatctgcttccaactagaagtccgggcttggggcttggggccaggcttagagtaggtggatgcttttctagctttacaattcataacttctcttttccagggattcataacttctcttttccagggataaatgtgggatttcatttttagttcttcatcatgatgtttgttgcatggggtcagttttcaattattttgaaagcaacttttaaataaaacatatttataacatttacttactatgaatgaggcataaaattactatcattttacataaatcacctcatttaatccctactttccactccaaatctattagattaggtattatttattaccctccttttacagatgtaaagtgaaggatgggagatttgcccatgataagtgacagatctgaggatataaaggcacgtaggccaacactagaggccatacctttaaccactatgctacattgcctgtgagtgctctatgccccaaaaagaatcattattcacccaacatgcatcaagcgtttccactttgacaactttgcatgtgcaaatgaaatattcttcctcctcttctctactggttggtagatatgcatacttcaaacacatggcagggaaaaagaaaactacctcgactatggtgcctgcactgagggagagacctgcatgttactgtggactttgtcctcttcctttctccccacatgtaatgtcagtcctctcccctccaactctactgccaatactttcattcaacacgcacccaccttctagactattaatctatattctatatggagtcttctttctctcaaatgtattctccacattctacaagagttatttttaaaaatgtaaaccccatcataaactccttttgcttaaacttctttaaaatgagttattcacatcccagaacagggtttcccaggcatatggcctggaaaatcagattcccagcatttcccactggaaagtcctggttgtgtaattcctgtggtctgtggtgtgccagggaatctgtatttatatgcatctgaggagctacttatcaccaggaaagtttggtaaacagtgctctacaggattaagcataagcttcttagtgtggtaaaaaaggatcttcatgtacgcacccacttgcctctccagcctcttttttttcaccatgcattctctcatacaaacagcaatatcaacccagttgttgctccatgcacaatatactgcatcacacttatgcgccttcgcgctggctgttttatctgctccctgcaccttccctactttttccatttggaaacacccactgaaggccatcaaaatctttatttatttatttattttgtattatactttaagttttagggtacatgtgcacaatgtgcgggttagttacatatgtatacatgtgccatgttggtgtgctgcacccattaactcgtcatttaacattaggtatatctcctaataatatccctccccccttcccccaccatcaaaatcttttaaaaccttccgaattttgtgaagacttccacagatgtttcagacagaagtaatcactccctcttctgaaataccttacaacctatatgttaaatgcaacattagaagcatgtgtatttattcgtttacctttctgagttgcttactaaatattaccaacttgctgaggaaagagatcacatcttgtttgcttcataccctagaacccaggacagtacttgacacaattatatggtccataaatgttcaatgaagagaataattttggggctccactattagtcagtcaccaaaatggactttttaaaagcaagtgctaatttaatcctaacaactgccctatgagacagttattattcccattttacaggtgaagaaacaaacattcagaaatattgctgcttggaagtggcagggcaaagaggaatgttcagatccacctgcttccaaaactgccgtttaatctgcaacaagctccccctataactgagtacctgccatgtgtaagagttacttgcacatttgtcatggtactccccccaccaccacatacacacacaaacacacatcttgggagaaggtaagccgttgaagataaggacccttgtgatttccatatttttattcccaaggtgccttgctcaatgaatatctttgtgtattaaatttaaacagcctacactaagaagaggtcttgagagagtgagagctccctgactccagagagtggtgtgcatctacacatcagccccagtgtgtgacaacctgtcagaaaaggacatccatgaggtagagtccataagcttccaataatcaatgatttatcaactttttttcatctttcacatttagtacatggaaattttgaaagttttattttagtggatggcatttgttacaaatgttagttggaagaagagatatgaaattttacactcccagtctactttcgtaaatcttcaaacttataaaaaaagaatgattggttttgaggcaagagtcatatctccagctggaagggttaaggaataagtgttttgattaaacaaatatttcattgactaagataaggtacttatctatattttatatgaatttacagtctaaataattataatttggctaaatatatatgtaactgtaaaattctcctgaaaattatttaggtttttttctggaatgatttggaacatatttcaggagtgggtagaatctcagcctctgtaataatgatcgtttattgttccacttgtgaagtatagaaaattccaactgagtgagttctaattagataatggaggatggagacgttgctctgtgttttcaaaacacgcctcatattttagcagatagaacagtctattggtattaatactaccaccttagatgtcctatatctgaattgtggcattccactatcctcagaaaataaactctaatgcctagtcatatttttgccaaactgagaagaaaaaggctctcctggcaaccaaaaacaagaaacagaaatattacttcactgtgtataataaatcaaaaaaattaaaaagttcatgttataccccagatgaaaagcttgtggcctccctttatgttaaaagataaaatgtacaaataaaaattaagacccatgaatggaaacattagatttctggagcttggatttaaaagatcatctaattcaatcttattttacaggtgagcaaaagtccaaagagattaaaggacacagccaaggtcatatagctaattaatgtcagcataggacaaagggaagagagagagtaataaaggaaccaacggttactggttccaggcaatgttatttgctgaacacatggaatctctcttaatataagtgagattatattaagcacttcactttccagatgtagtgactgaatctggcagatattgagtaaaactgggattggaactcatgtctctctgtcttctaggtctgtgcccttttcaatgcaatcatgacttttgagcataggtctcgactcatagttcaagattctagacagtaacccatgtagatgaaaaagaactcactacaaggttttgcttgcatcaccaaaaataattatatttgcccaaatgcaaactatgaaaatctggaggacatgtgtagaaaatcgacaacaggaggtggggcctaaaaattcatgaaatacttccaggctcctttacctgtgtgtgaagacccaccaatgacttccatgaggtcaatcctatcctaaacaacacttattagcaaaatggatcctgagtccatgagaactatttgccacaccaagcaattttccactattagatataccattacatttaaagacatccatctatacattttgtatagataacataatgaaattgcatctccaaattctgaccatatgcacataatataagacattaaaggacaaataagtcccattttaagtactatcttaaagtaatacttaaaatagaaacctaaaatttaagaacctacctacaacgaaataatgctaagtttgagctgatggtccattgacatatttaagacagtaatgaatacaacataagttcagtaaaacaaaataatttttatctcttaaagatgtaatggaatttgatggaatatatccatacgttccaaagagttcatttatgttcaggcacacatcagtgaaccaatacacaccaagttttgatcaacttatacatcttaaaaaaggaaaaaagaaaaatctgtggattttgtttattgcttcaaaaatggacatactaatgccagataatcgaagaagtgataatctgcaccttggaaaagcagggagagagagagagactaggaatcaaataattacaacgcagtgtgaaagatgttataatagaggtaaaaagtgccatgggagtgcagagaaggagccacggcctcatacctgggcagatcaggaaggctcacagagaagataatatcagaacaggattttcatctgtacgaatttccaaggcaggcagaagagaaggacacactccctctaggtctctttcattattttttttttcgagaccttgtgttccagcaagctgaggaaacttattgctgtatagcagggatactaaagtggttcactttcattttaatgaggaactagatttcagtgaaaccccgttgttgcttttttgctggtcctcagaaagatagtgaataactcaagactaccgagggataaatttggtatataaaagtggtgtatattattgtctgctgtgacataaaatatttttaaaggccaaattaaaagcaaatttccacatgtgaaaataaaaagtgattctcctactaccctcctccccagcaaaaaagcaataagactttcaacaaactctctgagggtagaaatcggaaagaaagaaggggaaaaaataacatggcgtcatcacagactattcttctgaagcaaagtaaagacaatgaagggaaaaatagaacacgtgtattacaatgtatagcaccataaggctgtgtttggtgctctggagggcttcaacaagtactgttcagccaaaaatcaattgaaaaatcagcatgataacagagcatgagttgccctataatagccttaagacccccaaggctatgtgagtccctttcatctggcacacagcactgactctaggggaccctcacttcccctccctgagtcctgtgcccatctgtatttcttacctactgctttactcttccttagaaagcatggctgacaaggaatgatgatgttttaaagtggtttttgagaattttttcttttctgctttattctcttccttgacatttgcacttaaatttatcctataatatgagtcatagactatttccacaatattaaatggtcagctgtaatctctgagtcacctaatgagttaatagtcttatgttttgccttaactaaactgccccttaataaaatcccagttcaggcttatgcaaatgtgacatgtaagcaattcacagcattgttataaatatacatatatatttcattccaagatttcatctcaatatttcttcaatcacttcctcacaatgtctggtttgttcaatttatatttctccttggcatttggtgcagacccccaaagataagatacatctgtcccttagtcacaaatcttggcatttttaccttaactcagtcgtgaaatgattggttgaaaattaccttgcttattagcaggatttcctcataataaaacattttatttccaaactttcaaatttgacacgagatgtactaactcagtagtgacatatcaaagctcaaggaggacatataaataccctgatccgtgtgaggaaaggagaagctaattggaagtcagcttccctgtgattatcagcttgtttatgaggagggaggactcttctgaatggcactgtaaactcatccctgattatggcgttaaaaccagagctcatttctacaagttccccgaaagccccctacccaatccattttgtttagttataaaagggttgtgcattgctttcagagaatgacagtttttcatgctttgattttctccagtttcaagaaaaattaatcagttgcacaagccagttgtcagatttcacttccctcatggcagaaagcacacatattcattgtctgctataagaataaattttagtaatttttccccatgtcaatatgaatattagactgacccaattaatatgaaatgcttctatggtgctggaacagacagtgctacagaaagagccatttgcacaacctgttcatgattatgggccataaggacacaaagatggcacacacatttgtggaccatctgaattcttataccgagaggggagggggaagggggcgcggcatgacgttagcttgactgtcctgggtcatgttttttaatccagagtattggacatgtaacacagcaacaagagctgatcattttgtttaatcaccttttggatctttgccagatggtctctattgagagcgctgcaaacagagagagatgaactgcatctaacacgccaccagagctttcccgtaaatgtctgagaactgattccaacaagaatttagtctcagagcagaaagggatacatttaaaaactatgtgcattaactatacttttccccatagaatcctcacttggcatgaataatttacccactcttatgctaatgggatcatgaaagtatccctctgtctttagtgcagctattctcagctttcagtaattaccccacccagtgaaaataacatggcttctgcattgaacggctgactcgtacctgacaattagaaagatcatggctgacagtggaagagtctagaactggacagagaaacccttgtagcccaaggaagagcagagccatagagtaacactggccgtgagtgggaatgcatgccggtgagaagtggcaagaagggtaaaaagaaaaattctccactgtcaagcttttctttctttgacttattatcgagattttacttaaataaaaatatggttctctttcaattaccagatgtgaaagacattcatgaccaaattaattttgaaaaaaaaaaaaagcaatatctaaggaaaaaaaccatagttaccattaaagcacatctccattaaatatctatttcaccagagttttaaaaaaatctaaataatgaaaaatcctttgcattttgctttttggaaggaaaaaaggattgccaggaaaaaacaaccaaaaaaaaaaaaaaaaaaaaaaaaaaacaccaaaaaagaaaactcattttctacctctgtccacaaaactccatgttaggtagttcactgtgtaaaaattatcaggctaaaacatctgggaaagaaagctatgaaacagcagggaacgtggctggtttattgtttatcttttgtttatgaggcagtattcaagtttaattactactctaaattaaactctaactggcatcaggagacatccctttacatgactcagttaaaaaaaaaatctagaaatcccaaatctgggtttctcaagtaagttgatacatataggaagaaattactcaaaattaacagcaattatagaaaccttttaagcatttatgggcaccattacatgctcctagagcatttatttattagaagaatttaattttacttctaatggttactactctaaaaagtcttgagaaaaatcaacagaaaatctttggatgtttgctgatggttaaagaatggcattattttaaattttatttggggggagaaaagagaaagaaaatgcaatgtaaatagtccatatacaacagtttattctatggcaatgttcaattatcaattatagtctcacagaatttttttgacacaattaggaggacaggaaggaaaaaaaatgtcattgtatttatcataacagtaagtgaccagttttggatgaacttagctctaggaaaaataaaagttagaagcaactagcaaaagattatgccagatggcatctgtcatattgtatttagggttattttaaagagattgccgccactatgaaaacattccattgacagagttttcctagactgaataagaaatcccagtagaacatattcaggacccacagtaagtgggtttgaagccccctcctcctctttaaatatataactggaatactttggtgggaaaaaaatactattttataactataacatgtattataagctcaaaagtgcaatactatcttagacatttgcttacctataaacacttacattcactactaaggagatatttgtaggtttcaacaccatgattgctaaacaactgtataatacataaataaatatctagctatgaggaattctagcctcatcgcctggaaaatagatggggacatcaacagagggacgtggtaggtggcagagttagggagaactatgctggcttgtacagccctgtgtcctgaaagattagagcaatatagattctagaatgctaatgtatttaggttaactgggtctggcaacagtatggttaacgtgcgtgtggtgtgcagtgtgagctcagcagttactgggccaactgtctcggtatttctgggaatcctgcctattcacagtgcagggattgttcaattgctgcaaaatgtacaaaatgaattttacaaaaatgaattgtaaggaaggccccattacaacgattttacagcaaagatgtcaacatcaatttttctttcatgcatagctaatgattaaaacagcatattccatttgcctaagacaatttatttcatattggcacatcaaaatattgaaatacaaagttatctttactctaccctttttattcattgcggctgaacccataccattgttcaaaccaggaaaaataaaacaaacttggcacgaaatacttaaaacaaaggctcatcaatattctccaatttgtcaacatctcaattacagcactggaaaaaatgtaaatttcatgtgctctaaacactgaggggtctattctcttgccaattcacatgcgtaactcccatcagcgttaatgggagctacacaaacccatcaataataataatactttgtacatatattgtgtctttcatctaaggctctcaaagtgctctaggaacaaggggctgcttcctagtcgttactctggcaaaatacacagtgaaatacaaagcagcttttgactcagcaggtacagaattagggatctctagacttattatcaaaccccattttactgatgggaagccagacacaaagagggccagttacttccccagagccccaagtctgcaccctaattccatccttgaaaaaccagattttcttcctccgtctaatgtgactaacaagacaaactcccttcctttggctgcttttagcaagagaaatcagtgaatgaaaagtctggttcatatttatatagcttactgttagacatgtgctctttgaaagatagtaaagtcaggtttcacattttaccaagtttatttcttaagatattttaaaaatgtgatatacattttttctcctccttttggttcattgctgaaacactatggaggaaaagatgaactttcacctgtgtaactgtagctgtttcactatcaggtcataaaacaaggtatttttaggttccaaagtaaagtttctatgaatcattatagtaaacataatcacaaaaattataaagcaacataaatacatgtattgttttatagcatgtggctattaaagtttaatttaaaatgtgtatgaaaacattgtatttagtacaattcatccctattttttgtgtttatcataatttgttttgaaactgaatcattttacagttttccatatgcctgttttgctaataaattctgaatgcgaaaactctttgcgaaactacaaacttgatttccaatgaaacattataatatatttaatactaaggacataaatttctctcccacgttttccattatacatcaaccctaagatttaacctaggataagcatatgcgatttcagtcaatatctctgttgactttgccctgaagcagataattaatctttcccactgaaactactctggacaattcggtgggacaaaatatcaaaataccttgaaaccctgtttaaaagactaatataggcatgagtatgacaacatacactcaagtctggccttcaaattttaaagtctgctgtaaaaagccagaatgctcttatatatgtgttttaatcactgatgtggtaagccaggtaggaaattttctatgccaaaatagtccccattttatagaaatcataccttttttttctttcaaacttcgatacagtaaaatgactgacttcctagtactcatacacataagctaccatgtccattctttaatcccgcagagacatgattaaaggaacagaatcctacagggatcaaatccttcagcattggataagtgggtgcatctacccacagcacagaagtttgtgtgattgtttttacctatatatcagtctcagaattcttctctttcctaaaaaacaaaactaactaaccgaaacgctaaaactttatgctttgctcgttattacaagtaatccccactccaaaacctgggttcttctttctcccacctcctcttctctctggccctttcttgctatctcccttgccataactcaactaacccaacagaaccagtcagttttaaatttcagttgggaccttggtgacctgttaatgaatctacagagaggagaaaaactcacagtgttgagttatgcctggtgttgctagctgacttggagtcagaaatgcttgaagcgttaacgtaattgcaagaatgtgaaaaatgaggcgctgggctcctgagcaaagcgaaaggtcaaagtgagcctcacacacaagaagtctctggaagatagcctcattagaccattaagtcggcttctccttttcccctcttttatacaatgtttagagtattttgtttttattaatagatacatttcaccctttgtgtcgccgcaatttggggtggtgggaaggatggagtcatagaaagctttccagatttaaccatgctgagaagtccatcactgtgacatggaaccacagttaagtcattgcttgcagatccattgaccctatgtaccagttaccttgaaaatgccttataatttacttatcttttatatagaaactaactggtaaaataaaacagtatataaaacagtatatattatataggtgcaagttgcaagttcttccataatttgccgtctgatatgattcatcgctgtgttagtttcaatttgcttaaacctagattctaatttggacccattcacaaatgaatggcatcctagaaaggacatttttctagactcttctagaacctcagaaatccaaaattcctagtcagaagcttggaggacaaaaggcaccctacttacatcaacaccctcttttaaatggcatatataactacagctcgagctgttaaactgtcctctacttggaagcctgtctaagacttaaatatcgtggccataaacacagtcataatagagatgaaatagacctaggagatcagacaccatctaatgtaaaatattaaaaagtaaaatctatacacttccctggcccacattcaataatgcatcttcctttaaattatcattttagccatagatgagtcattcctaccaatatataattgctctctgtgcaataggtgagttttaaatagtaaaatttattctaaattgcactaggcttcctcaacatctgcagttgatgtcccccttgccctctgattattctaatttttaggacttgtgacaaaagtcaccatgtcagctgaatggaaatggggacaaataatcctctaagaatttcaaaatctaccttcccaagataagattccatgtaaaattccacaatatttccagagctaataagaacagatttttaaattttatgtgctttagaggcataattgcttgattatagagaatgcttatagttgatattacaggcaaaatatgctatttatagcacaattcaagctactgcatcacagcagtaaagcaggcctgtgattccacttatacacacagaaataaagtgtagataaccaaatttgtaaaagaattggcagaactaatcaattgttattgtaatgcctacttaaagattagacagctcactttgatttctttttttaaggaaagtaagttaagaagaggaaatactgtctctttaaatagcagctgattctactccctaacctgccactctcctgtttacatggcggcagatgtactgatatcataaaatactgaagttattttagtcatgcctactttgcacgaggaaaatgtttgaccttttaccttgctcactgctgttgtctccgctctgggaagcatggcccccactggagggccctggggtgcctgctgagtgggttgaggttgcatcatcgtggtctcgccaagaagaagggttctgatgtcaggataccaaggaatttttccacagttaccatttcagccatcaatgaagaaccaaaaggaacggcacagaaagagacaaaaaaatgtatacatattagtatttgtggcagtaggcatatacgcatgccatgttatggtgtgctgtctttttagtaataggtatataaaagaaaagatgttctagaacttgatgtggtgatggttacaccagtgtatatgttggttaaaactaatttaagtgtatactttaaatgggtaaattttattatatacaaatttaaacctaaacaaagttaatttctaaagtaaaaaaaaattatgaaaaatgtaaaagtcatttttactctcgctatcttaattagggtacattctactaagaaataggtcccgatgctcttggacactcaatacttcagaacattcacatctgcaaaattcaatgactccattaaaaaaattacaggctccacaatgtatgggacagcccttgacatctttcaaatgcattgccctaaaacaacctatacaaactctcaaaattatcaactgattgactatataaccaacaaaggtaatgatattaatcactgtatcaatacctaataaattattgatttttgctttaatttgtagaaataatttaaaaaaaggaaacatgtgtgaactactgtccatctagtaagctagagaggagtttcacttgagcttcatggaagcttgaaattcactgagcagtgctttttcctagaagaactacttgtttcaaaggacatgcaaggcaaaccaagagttatagctcatgctacttggctgagtatattcttcttctgttcctcctcccttttcctgatcattcccaatgccctgctgttgcttaaaggaaaacaggaattctaatgtacaggaaggactttatcagcaccacatgaaggcaggcaagagatggaatttcctctggcagaaacggagaggaggaacagcatacgaaacagtccagccttaaagccagagctgtacacttgtcacctgcatatgacgacttcaattaagcccacagacctactggcaagtgaatgatttgggggccagaggaaggggcaaaatagttcctcaaaaccaatcaaagtatacaaagtatataccaatctaagtatatactgaagtatacaaggtatacaccaatcaaagtatacaaattttacaaagtatacaccaatcgaagtatacaaattatacaccaatcaaagtatacaaagtatatcactaaaaaaaccaatcaaaatatacaaagtatatcactaaaaaaaccaatcaaagtatacactgtttcttactagaattggtaaataagaattcagacagagccacgtgggtataggcaacaaataaacctcttgaccaagggaaagtaatcttgccatgttgccattatgtatagttcatcaagaaaagaagtcagtctgtcatttttctcagcatcaactctacagtgtacatatagcatggatgatgttaccaaaataaaacaagaaaccaaggtgagaaaaaaatagggaaatgttcttatttggaactacaaaacttatttttccccctacagatctgcagcaaactgactgtgaattaatatttggcatttttgatagattatgaaataataatccagagctctatggattaataacatctatataaaataatgatactggcactgctatcaggcaagcaattgattcaaagtgaaaaccctgagcagaaattttgtgactacaaatatggcacaggtatagatctctaaaataaggatatgtttgagaaagtagattagggaatgaaattgagtagaataaaataaaagtcaaggttttctgctgcctgtagaaagacaaagtcatgcctgtgagctctctttttaatctaagttagaaaccactccaatagtttcaagcaaaaggcaaacagaatacaggggctcctcaagctttgaagcctcttcgtgtcagctgtttgccgggcggtaatgagataaagagctagaagaattacatggaaaaaaaaagaaagaaaagaaaaagaagcaatagcatggtgtgagtttagtcctgcgacaacacaggctagaggcttcttttagaaaatgcaatagctgcaacatattcacctaagctaaacttttcattgtacacagcaatgatgttaattttatgcactgcaggctttttattaagctggctgctataaaagctccttacccctcatgaaaattataataattaaccactaacacctcaactatgttttaaggcaaatgtcatccaatagctattatataatcgtttatatgaagccggagcaagtctttctgtttaggtgctgcattgatttgaagggatcactcagaaggacttcctgtaactgaaaacactggtttgtccctatcagctaaactggtgctgagttttcaagttaggcctcattcgtttataattcagtgtatttctttcaatggtatctgaaggagatgttttctaaagtaaaggggtgaaaaataagccacagaagcaaatattacttttaagagcagctggttcttccaaataaattgggtctttggttttctgcccattcccaaaatatgcttaagttcactctttaacctaccattcccttatctcttccctcttttctttctcactctttaaaaatgctctcctgaaaaagtgtcatgtttatttcccatagagtgtctcaagtattatggtcttgtttgagagactgaacaccaactaaggactatcacacgatagtcatctgatttgaaagaaggaagaacagataaatccctctggggtttcaaggctgaggagttaccacaagttgtttgtattgagctacacaaggtggtgatgtgatcatatacaaatacaaatgttgataatctggtcaacaaaaaattgttcctccttggtcataaaaaactgtcactgacatggatggacaaaacctattacttttaacaatttgttttccctgagattaaaatatttgtttatatcacaactcctttcttctattcttccccttagagtttacaagtttccatccttcaagaaaaatggcatggctttctgccaaattatatgcagaagtttagtgaatcctgaaaccaaagtgacatacaaaagcatgtaaaaacacatgatgcaagtagaaaaataaagagaaacgctcgccgggtgcccgtgtatgactgagcattcaggtatatgcatgccacaatatatgtcctgttctccagccaaaaaaatcatgaagacacccgagggcaaggagtgaacatgtttctattcccagtggctttggtaattgggagtcaaatatggtactcttcttgctcttacgtaattgtgttacagagcagtgttaccaggagaaaagcagtgaatactgagtggagcacaatagaaggagatggaaaatagatacaagaagctaggtctctaggggcagtattttctatttgctgggctacagactcacagctgataatgcaagttgtaattaatataaaagcaggagacaatatgggcagagcttgtagtagtggggccacaggagagcgctctgctgctctactctgtttctcatttacacacagctttccctagaaaacacaattgtgccagtgttttctcccttgaaagttaaaaaaaaaaattgatttagcactatcattgaattttgctaaatctagaaaagagcatagagaggacaggagtctctgggcataggaagcaaatcatatgtgtgcctctcttgttgaagttgcagatacactggaattgtaacattttaaaccattatggcatttccatgagggacctacctataagagaatacttaataagtctcggtgaattggtgttatttccctatttaaatgattccacatggcacatggttcttccatggggccagtggggtgaaatgtataaagtgtttgtaaataaatacaaaactgaatggagaagtaaaatgtatgaggcttcaaggagaaaagcaaaggccatgccacatacaagttctatctaaaataatctgaaactcattttagatcccaaatgaaaaggcaatgcagtggacatggtataggaaagaaaacattagattggaattaagatgctggcatgccacctctcaccagtcaggtgaacttaagcaagtgatgtacctcatttctatggggctcatttcctttatctctttaaaattaagaagttagaccagataacttctagaacctacacaactatataacatcaagagaaaaattacatgtaaacttggaaaatagaataaagtaactcagggtatgtgctcataggtagagagtaatagtaaacatacataaagatattttaatcagtaaatgaagcatgtacaactaatttgactcaatatatttaaacaacaaagggaagatatacttgtatcaacatacataattaaattacttatttcccataactttataatgttttaactcctaattaacattatgcaaaaaatatttttaaaaataaaacaaggactcctatcttggggtactgaagtctacaaaagttaaaaatgttaattgtgtggtttgaacaaatgttggaatttcaactccggtgttgtaaagttgacataagaagtcaggagacctatgtgtgctttcagaacctggactcactctttaaaaatgtaaataaagctggggtccttccctcacctccccacttctacctctctattaagctttgggattaatatgtaagcaactctcacagaagtggcaagcaccctttgcaaatgatttctccatttagtcgagcaacttttagagaagacagaaatgtcttgtattgttggtgtaatgccatattataaaatgcctcttaaaactttgaattgtgttgggatattccatagaacatttagtattaaaaaaagaaaatgaattaaagaatgccaattttcaaaaaatctgatagggaatgtctatgtggttgtcaattacaacctttgtttaatttcatctcatcacagttacactgaaaacatactccaactgcacagtctaaatgatttaaatagtataattattcttaatggggaattaagaaagctaacaaccaccagaaaccacgcagcagcaacacaacagaaaatccacgcacccagccatgcttccttgagttggtggacagagctcagaagtagaactttatcggaataggccccagaggctttgaatagcataccataaggtctcaccttacactaaaacataagaaactagcaaataaaataaagcattcatattattatccaatttcattatttcccccttgatattctatagaacaaccacttgaacctatcccacccctcactgtcacttccctctaatttttcaggtagtaattgaatttatctagagtcacttgcccatattctatcagaaataagattctggagagtctcctctctgacctaacccatttgaaaaaacaaacaaacaaacaaactgtgtcaacataaacttgatatattcagagatgcaaaagaaaacaccagaatatcttcatttaaattacagctttcaacatataaatatacaataagttttcttttcttagtggtgttagtagatccaggcaattttaaggtatctgctattaactgttaacagacataattgtattttctttcctctactgaattctttcaaataaaataaaaatgtagctctttatgaccactaactaggaataacaatataattgtataactgtatttgcttcaagaaaatagagcttagctcagagaatatacttcaagcaagtagatttcatttgtctgaactttacatgtaatatctttacatgtaatatctttacatgtaaatgtgaggatgtattttctttgtctgtactaggtctaaatatctgatctaaaattgtgtaaaatagataatgtgagtatcacctgttattcaggaactccacatgctagaaaaagctggtcatttcacagcagttttcaagttgaaacttctttaaaaattgttttttagacatatttattttaaacatgataaatttgaatgtctaggaaactaacatgaactgcagctggaaaacagagttctatttccttcgactattatatatttttttctccccaatattccaaaaatattgtaatagctctttcctacctataaatattattattatgttatagtaaaagacaaaatacattataatattaaaaacataagcatgcattataaatttactaaatacaacgaaattgtaatcaatattgcttattttattttctatttaattccaaacttcctctttccattacacccatcatatgtaagtgttaataataaatgaataaactcagtaacctcactgaatgtaaggaatggaaagcaagaatattatggttgtcttcttctaatgcatctgttatatcaaattatttatataactttatgaaatgtgaacaggatttactaataatatataaaacttattcttaagtctgccaatatacttgctttgaagatatttatatttattacttttatttatttacattttcaaattcttttaaagaatactgaaactatattggtacctaatattttgcttctgatgcatttctctctgcttttctctctctccttgcatgttccttccttaaacatgcacacacacgagtatgcacacacacacacaatgaagctggataccacttaataagagtagaggtgtatgtgttttgggggtgtcaaacagctgtcacaaactgtcacctccacaagagaaaccttggcatacaacaaattaaactacacttcttttttagctgtcattattcatagccaataagttgaaatgctctcagcatttcatgtgcaaataaaaccaagaggaagctcagatcagaatagtgggccaacagataaaacaagaaaacaacgcgctgtctgggcctttctgaagtggctcatcatcacccctgcaccagtgttcaccaaatgagatccagcctggggcaatgtattaaatatgcatatcaaagcaaatgaaaaataaacctgaagattcaaattgggcacatttacatgctgaaaatgtcccactcacaccacttttcaggtagtggttctttgttatttttactttgtgtttggctagggggttgaaggaaggcaactttgtagaagaggctgaaaagcataagaggatttgctttgaagggggaagcctggacatgaatacaatcaatacacctatggtacaaaagtctcaaaaatggtgaaaactctccaaggttttctctcatgtccctgcataaaatacaagtctgtggcaaatctctccgttttctacttggtgtgctggtggaacaaattattgcttcctttcaaaacaaatagcagggggctaaagtaaaaatgttatagttcagatctctaggaaataaaaggctttaaattatgacacccaatgaagtggcaagccctcatgggttcaaaataaatcagttgtcatatttacttgactgggggcctgaaaggagagcaacaaatgttacagttgactcttttatccaaagatgatgattgataaattattaaagcactatcctcttaggtacaacttccttcttgagtggatatttaaatattacaatagtctcataaattgatattgtctatcagccaatactttaaacagcctattttatcttatcttttctatgtaaacatcaacatggtctagctgtatacatccactggaaaaagagttgccaagaaactgttttagaaaactaagtagtaggtactcctagaaatatcatgagaaaagcttttggctccgagaactgtgaacctctcattttacaaaccatgtaaatagatccctccccagtctcccaataatgtgaataaatataaatatagaaacagaaaacaatgaaaataaacacacaaaaaacaacaaatgtaaatatttcttaggtagtgtcatgcctcatggaccacaacacactgtggagccacagatcagcaaataaactttccataaccactgctgcatccttttgatttcattacattcactcaatatacaaaggagatcaccaaagattccctcaccatgatggaaaaaggtaagggtaaagagataagaataggagccttcaacaccgcagtatttattctgtcacagaactggatatcccagactgcggttttcttttctagactttttctaacttttgttcttaggctggcttcccatacaagtgcaaaggttaattatgaaaatctatgactgcatattttcaaaacttttgtctggagcaggggagagaagaacctcatagaaggtttatactaaggcatcccaattcatttctcataccagtcaggaattgggatgggaggtagggacaaactgccttcaagccttaatgcctgtttaactcacacggagtgtcaaattaatatttcggccacaaagttattaaactacagcttatattatttaggctgtgagttcaactgaatgtaatctatagacaccctgtcccccatttccaggcttgagttcctataaataaaactgctgttcacacccactctttaacctcgccactcttgcctttcctaccagctgcaatctttcttctctttgcttctttttcaaattttcagtctcactacatatgctttttttttttttttttttttttttttttttttttttttttttttttttttagcatcagactcactagattggttccaaaataggattagaaacagagagaatagaaagaaatctcctttcctggcctgacatacacagtcatttcttactatactctccatcctcattcaccaactgttaaagtgttaaaattcaaccactaacctatggttactcaatcataattcccttcagctttctgtaatacattgttaataattggttcatcaaggttactgtcttttattatgaagatgcttcaggcatttggcaataagtccctattctgacaataagtttctatagcaaaagccctgagaattgtaatgtgtttgttcaccccttttatttcgaatgcagtgcaagattgccaataattctcagaattgtcatctctgtgacatactaggaaatcagcactcactcaattctctttcattcagtcctctctctccagaccagtccagctaactgtcttgcttctttctatccctgctgcactgattacacaaaattaagaaagcagaaaacacagtggtgactatatcaaacagaatttgcgaacacccaagtcaccaaatccagaaaactttacacattaagagcacaaatcactctatcaactctggttttttggctctcaacataaataggagggggtccaagaaaggagaaatgaaaatgaagggtatggcagagaaagcaagaaagagaagaaaagaccccaaaagagacggagtcatttaaaaagaaaactaaatcagtggagctagatgttaaaacaaggttaaaataatgctttgcccagtggccttaaaagattgctaaaggctagcagacttacatggtcagcgagatttgtggaggagcctgaaagttcttcatgatctgacttggagctgccgtctctttcatcaatgacgaggtcgatgggcattttccccttcaaacagctaatgtatcggtggcagaagttatcgcacagttcgtggacctagaacgaaggtcatggtggagggtttagctcatgttgttgttgttgttgttttgtttcatttttagaaaggaaaaataccaggttgcaaggttacatttgcaaagagcaacagtgtgatgtcttccaaactaactctaattaaagggtgtaatagttgaaggcaaggaaacaatagagtaattgttgcagcagatattattctccagagacttctctgagcaacaagttacaatagagagagaaagaaacaggactggaaataactgggttcagagtgggagtccagggaattaaatctgatttgataataacatcaaaacattacaacattggagctggggagagcattaacgtttgtgattttataagctaggggtttcgtatgtttccaggggaaagtaattgagctgcagagcaatgtaaagacacccagcaaggatgattcactctgcctgcacctaatgcaaacccagggccgagggtgagctgagctaataaagatgcaagcaggctgagtgtccagtaacataaatggtttgctgcatttcaaaataatcctgaatgcctgaggggaatattggggaggaggaggctactttaaaggcaaggctgtcctgattcacccaccctctgagcccctgtgttgagaagcgagttgaaggatggacatggttacatgctcaaaatctccaggtgctcaatccctcacactagaggtttgttaaaaacatcccaactcaactaggagagggaaatggtttaatcaacacggggagcgttatttcctgcttaccttttctaactccaaaagatgaaaccttagtacttgtattgcttgtatcatctgaaagaaaagttcagggaatggagttagagctctgtgactctgaggtcctgtcttggggttgggagtggggtgaggatggtggtgagaaagttgggctggggagaagaaacgggcaggtggccaggaaaaacttaaacatcaagaaatagtcagaaaaatcaagtgattactgatcatctctgcctcattggccacggggtaggaatctgactcaacctgagcataagcattaatatctttccccctgatgttcactgtgctatttgtaagactgctttcctcgggccaggccttttttctcctcttagtcctctttaaacatcccctccctcgacctcaggacaacttttttttttttccttaaaaaaaaaaaaaaaaaaaaaaggtcccttctcaggatagaaaaagctttttagaacagcatacccagcgaaatccttcctcactaaagaaggaaatactcaagatgaatgctgaggcagggcctttgaaagcggatttaagtacttttaatattgaaatcgtgcaaattagcaaaagaatcgcacctaaaagtggcctgcgctggcctgcccctcaccgccccccagcccccacccccagcccgccctcagccgtgccagtggttacatccttcgggttagccgcccggggctcggccgcctgccccggcaaacagaggaaataactcacttctcgcagtttactcctggggccgagacctgggaaacatcccctgctcgcgctctcggcgctcggtctcccgtttcggcctccctgggcttcgctccccaccgcgttcatcctgctcctcgctcgccagctcccgtgcgggggctctaagctgctcccttcctccctctctccctagagctccaaaagagggttctgttctaactccccagagctccagcagaaagtgggtgcttctgggcatgggagagggcaaaggctggggaaaaacaaggaacagagagccttaccaaattgtccagctctggatttgaggaaaaaagtggcttttcggcgcgaacctgtaagaaacagagagtcaacttgaacgatcaccccatttaaaataagaaagctgaaatgtgagaatgggtacggtggagggcaatggcggagaagaggaaaggggctttggcaaaatacaagaaagaaactggtgccttaaattagtggagtccctgaagaagaatcagggcattctggtcctggccccattaagggggacctggtacgactaagctgtagccaggaactcagggtcgttctcagggcctcgagttccatatccagcagtccaagaggctgtggctctccactgctgcctgggaccgctcggagaggcgcccagcttccttgcctcccgggcactcccgggtccctcacagcccctctccccaattcttgttcaagtagctggaggcgggggaaaaaggccaagccccagattaggagcaggtcaactttaattcgagggtcgacccctgtattcctgctgggggggaaaacaaacacccatatttatctccacttccaattcgcccccaggctcagggatggggaggaggcgtagagagcggactgggccagaggaacagatagggtgtccctggcctttcctcctttcaagtaaagctccgaggaaaggggaggggtagtgagggactgcccgaagttgagtggatcaagaaggctggacctgcttggcgaagaccgcgatgtcctcgttgaaggagtcggaggagcagacgtctccgccagccactccaggttcccggggagtgcaggtcgccagctcgcacttctcaaagaccagagctaacagaggaaacaacgggtgcctaacgggcagcgccacgcagagacacacacacagagacggggtgcagaggggaaggagcaagaactgtaatcaacaagtttggagggtgtggagtccttctttaatacaacaggcacgcaccacactttacaacccttcctccatcaggcgagcctaagccagaaacagaaagggaaaagggcctggccctctcccgcagctcagaggtccctcagatctggccagagaagaccccggccactgcagcccgacaaataaaaacagcctcagttggaacgtaatgaaacatccgagacgctcaggcagtctggagcccgagtcgattctgatccactccccacactacggaggccgcggaaccaacccctgagacccagccctgacctcccaagaagggaacactgtgtgaaattgaaaaaaaaatagttttaactctgcattttaatgggcatttcagacgaggccaaaggcttcacctacatacacaccggagtgacacttcataaatgcaagagaatgctcttttaatctctccacctccttgccttataaacttgtttgctcctgttctactaaagccacagtgtgggggccaaaataataggaaggttacacactggagagcttccttccaaagaccacatttctcccagcgttgcagcagacaaaaataaataaatcgtgttttaaaactttaagtgtgcgtgcgcgtatgccctttgtgttcctccgggcggcttagccacacttcgggatgcttgcggcctctggcttggggctcagttgctgtttacccactgtcccctcccctcggcatcccgtcgctttgcccacctaccctcagccggaagagctcgtgtggtacacgttaggatcgtgcatctcacccctcgccaagtgctctcagaatataaaataatttccagccatcttccttactccccctaagagcggctccaagcaagcaagagtcccttccacctcgctgcacttcgaggtctgccccctttatttacagagaattaagaagtgggtgattaggacttcctggccgacagaagcagccctgatcccagctcaagctgctgttagtgactcccagaccctcagtaggaaacagaagaaaaaaaagtaaaaaataaaaaaacccaaagttgcttctcatcggcaggaaactttctccttcgtcaaggcctctgttagggagcctgaaacgagcagtcctgcgtcctttggccaggaatcctgtcctcggggagaaggccccggcaagattctggggactcagtcactccaggctgtggggtctggagtggtcgggctgtgagagcgaaagaggctagttcttcggggctttgactccaggggcagaagagcaggccccctccacggtcccttcctaaggcaagcggcgcccgccccccaccatacagaagtaactccccacttagtcgtccaccttcccacccccacagagacaaacacacactctcacactcacacacagtaagctgggtccggggggtcagtttacccatagatcgcgtccttgtcccgcttcaaggcgtcgttgacagcggatcccatactggccggcatgacattggggtgcggggcgtgcgcgccgtagtgctgtgtggcgtggagcggcggcccgtggttcaggtggtgaaccggggggatcggccgcggcgcgtgagggtctccgtacatggaagcgggaacccctactccgtccatcccgccgtaatggggcagctcatcgtactgtcagaacccgggaagggggagggggcgcaggaggtgagggagaacagaggaggggggtggaaagggaaaaagagcagggagaagagggcgaacagaaaagagaggaagggataaagatgagagagagggagggaggtaagagagaagagaggaggaggaggaaaaggaggagagggggagagagagagagagagagagagagagagagagagagagagagagaaaataaaaataaaaacaaagtcagaaaggagaaaagtaccgagcacaagttgagcacacagaaaccaaaccagccaaaacaacggagttaaaagttgtgaggaaaaaatgttattaaatttaaaaatgaaaaagcatgaaccaagagcaacgtttagagaaggaagaggaggcggcgaggccggggatttgagggggcgccgggaggccccgctcccgccggaggcaacagaaccgtagcgagccaacggagggagaagtggagttagtgtgaggaggaagccccggatcccacccctaaccccccttcgcctcctctgaggatccaataaatcaaaaggcgaaatgaaacaaaataaagagaagaaaaacgctaataatcagcacgagaacgccgaggactaggaaagactagggccagtgcctccccgggggcagggagcggagggtgggggggcgaataacgtgaaagttaccagaaacattatttagcagcggattccctgcgtccttgtcaatttcagagacaaaacaagcagcccaggctagtagtctaggcggcggcgcagcggctgcggcagcgcggccccagcggcggccccggcggcggctcctacgcagcccgtgcccgccccgagccgcgcgagccacggcggcagcggcgcagcagcggcagcaggagaaccgggggaatcgcgctgctggggtaaaagctggagcgaggcgaaagcgtgtaacgattgcacacgcacacacacacaccactcacacgcactcgccgcccgcccgctcgcacagcgctggaacacgcgcgcccagacacgcacacacgcacgcacacacactcgcacacacgcagaggcacgggagggaaagaagccgatgaataattttgctattttttaaaatactggccgccatcatcaagcagcgagcagcagcagaagcgttgaagggagaggaggcatcgggacaggcccctcttaggagaggatttatatctaggtaagtgttggagatttaaacctaccctttgcgccatcagtctgcgctccaataaactcctggatgtgtcgtatatttaatatcccagtccggataagaaagtgatctaggctgaagattccttttttttttttccaaaccaaagagacttctcccaattctccaatatgctattttttaggggggaaaaaaagcccagtctagacaacgaagaatttttttttctgtgatatttcttctttttctcttttttcctcttcttcctcctcctcctgatcttcctcctcctcctccacctcctcctcctcccccctcccctcctcctcctcttcggtcctcctttccccctctttctcttctcttcccctcagttggaaaaaaaaagaaagaaaagaaaaagaagaaaaagaagaaaaaaattgtcaagcccccgaactgaaggttacgagcggcccgtcagcagcccacatgtaaccgaactgtcgtgtttcatggctttttgccactccagctgtcaatcaaagcccggaatgtcaaggtagtgaatgaatgatggttgatgatgatgaagaggaggaatctttcagacccgtttttttcttccagtaaaactccgcgaggggtttctgcttcttgaattttttcctcccccctccccccttttttagctttgcccccgcggtatctataatacgatcctctctctttaaagtattgttcaaagaaagcagtgagaaaaatcaagaaaaaaaaatgaatagtttgcaaaaattggacttcctccccccctttcctggtaggtattttgtctctccctctctctctttctcgctcgctcgctcgctctcactcgcgctcgctctctcgcgctcgctctctctcgctctctttctctctctgggagatgagtgagtgtcagtaggtgttggcaggttggctgctgcctggcttattgaagagcctcagtttggcggcgcgggtcggcggcgggagaacgaaatgacggaacccggaagtcgtggtggccatagcccgtcgtacggcggagacacatcccgggagtggggagcgggagcgaggaggagcgcgccgcgccgagcctctgatatgcaacgagtgcgatcggacagccccggctgggggggtgggggaggcgggggggcgggagggggaggggaggctcgagccgggcggacccgagcaaatcagcaagcctgctcctccacggggatgggggacggcgggggggaggaaaaggagagtgtgtctgtgtgtgtgagtgtgtgtgtatgtgtgtgcgtgcgcgcgtgtgtgttgcgcgcgcgcgcgcgcgaacagggagagagggagagggggagagagaagaggacagggagagcgcagagaggaaaactgcagaaaaccacagggaaagtacggtaccgcctcagatcttttcatttaaaaaaaaaaaaaaacttacttctagttcattttcccatcactcccggctcctgcctaactgggtcttgccggggacgtttggcatggcgctctagcttttgttccttttaattccgcggcctccctctcctctgcccgccgattacagcaccccgaaggcttcctgctaacgtccaagggcagcaagctctgcagacggtaccactgccgggctaaattttttattaagtggcactttcttttctgcgcagatccagcaaccttgtcaatactcatttttttccaggaccagaagagaccagcttaactcagagcacactccctccaagcggtgcggacaaggggccaccccgagagtctttgggggccgcggcggaatcgggagggaggaagtgaggaggcagtcatctgggtccgatgtagccaaaggcgtgtgtgtgtgtgtgtgtgtgtgtgtgtgtgtgtgtgtgtgcgcgcgcgcgcccgcgcgcccgtgcgcgcgcgcgactagtgtgcgtctccaaagtggatctcactcagagctgggaagcacaggaggaaaagacggagagagtgggggagaaagaagttgccgggcgaggaggagtggccggcgctcacagcccagctttgttgtggtcgcccgaggcgcagcggcgggccgcggtaacgcctgctaatggctgtgttaattacacaggggcgatttcgcggggtcagggagatggggccagctccgaaagaacttttccaaaaaggaaaaggaaacgaagggaactaccccacaccgtttgggtggaaactagttgtggccggtgccctgtcctccctggcccgagctgcaccaggcttcacctctgcgcggctggtttcccggcggccgcgcgtcaatcactacgagcccggagttgggggcggagccacggtcaccccgcgcaagccttgccgcccagcagcccccatgcccctcggccccttgtggcgcggccgggcggacaggcgctggaagcgcgtcctctccccaacttctcgctctcgccctcccagtccctggcccagagagtggaaagcggactgttgttctccaacagccgcatccctccccaactttgaacccattctgagaagtggagagtagtgtcttccgcgagccgcgtctaaccgactttcccgcggagggagggtgggatgggggaggttgattagagagaataaagtactctgtgtgtgtgttgtgtgtgagagagagagagagagagcgagagagagcggggaggagggcgggtgggagggctcttttttttggcccccgttccatgttccctgcttcactgtaagctttcgagcaacagaaactaggctaagattgcagcctgcagagactccaagcggagtcggagaaatttggcctcgttttaatagggctgaggaatgaactccggaggtcaataaagccctccaaaaatgatgaatgattgagcacctgtgatgatgatagtgattaccagagcaattaaacagtttgattaaatgagccatcataacaatgatgtctgcgggaaatcggccctcacatataaagaaagatagtgcgaaggggctggcagaggcgcggatagcgcgacgccagggagaggggctgcgggccgcgaggtttctgcccaatggcccgagcagggacggccagactcacggagcttcagggaggagagtgtagcccaggttttcagccactcttttttgccgggcttcaagcctgctagagccgacgggtaggaaatctgaaggttggggggagggtacttcctccacgtcctcttttttttcctagaagaactccaagattaaaagtatccttatttgttgctgagttgctcgtcgacatttaagagaaggtgagtaaaaaagaaaagaagatgaaagagaa

SEQ ID NO: 366 - DNA, 83783 bp, Homo sapiens
  source 1..83783: mol_type = genomic DNA
ctcaggctcctttgctgcactcagattgctggcctcagttacacagaggacagatttgccacattcaaaaatgctctccctggaattgaaatgagtttgcaaaaggtaggagtacattttattctcattcttgtgcatcttatttaccctgatggaaagcattacttctctttatctttcaaggtgacccaaaagcatccaaaaccaggttttccagaattatagcatgtgtcctctaatgaaatgccaacattcactctctttaaaagtaaaaatatcaagattatatagtcattaaaaagaataagtctgaactaagtgttctaagatttgatgcctatgatgactggaatggaaaaagcaagtcatatgattctatttaaaatacttacatttgcctgtgtgtaaaaggcaaagatctcaattgagcacacggtggttaactggggagtgggactatggtatgtacagagggcgaggaaggggcttgcacttgttccttatttctgaattgttctgaattgtctagattattcactgagtgtgtagtgcttaaaaattaattagaagacatcacacacattcactgagaatcctaatcaatcttcactgcatttaaagtctggaaacggttacattctcagtttgactggtttcatgcagtgttcaattgcttcacctgacattcctcgggtatcgggttctgtgccgggcacggaggctactaagatgaataacacctggtccatgacaggatggcatctaccccagaacacaggtaagagagacagtgaatttggtaaaaatgggcaccgtcatcagtaggcatacatcagctccctcatctgattcacaattggccttctgtaggcttcttctcttggcaatgcaattggcaggcgtcatccttttatacttaaactccaaatttaggattaagactccagttaatactgccaagcagaaggcgtccttggagaaagagaagtctcctgaacatacccactggggtacctagaatagattttgcagcgacacacagatcctgtgttgtctggagtctctgctgagtaatgtagattctgggacagcaaaaggggagctggtgactttgaaccaaattttacctttcaactgaatccaggggaataatttgcaacagagtggcagacgatacaaagtgctatgttgaacactagattgtgctttattttttccgcccaacttcacgtttccatgcaccaaaatgttgatgctataaatattggatgccacgcttacctgacaggcttcttccatcccacctgggcgcgggggctcagagcgagcgcgcgagccgcggctggagcccgcctctcgcggctggagaggactcagccggccgcgggttctgctgcttgcccgggtgccctagccgcttcccagccagggctcccgcagtcagccccgcgcgcgcacgcgcgctcccctcgggcggcctcgacgcctcagggcttcggcagggctgcgactggccggctccagcgggcggggcggcgagcgagtgctcgcggccacgtgaccgacgccaacatggcggcgcccagtggcgtccacctgctcgtccgcagaggtaagcgcgtggaggagagccccgtgagggttcgcacggttgctcactaggtacgcacccgggtccaaagggatgcgcacccgcgctcagacttctcggcgcacacgactgtactttcagtgtttacgaacacacgcaggcacacacgatgacacattcacacaccacaggatcacacatacaaatttgttcactgatcacccgcctagaacacgtcaccacgtggcatcttttcgcaattactccttgagatttgcgggccattgtctgaagtttttttccccaacttcggttgtatcattagtgtaaccaacatttattctgtatgccgagcaaggaaacctatggtaattctgaaatgcatctggacacccggttcccttccctagagcttttatgcaggcatgctttttggggacttgcaaaatgtgatggttttcttccagtgacttaaagttaagaagataagaaaggatgactgggtagttctaagtaggttttatcctgcgtgagtgttgagattttagtaaatatacaaatgcctttgcagcagaattggggaaatctttgttggatttgaactaggtgctgaatctttgttggaaagaactagaaagtttttccaaggacgggggaagaggaaaactatcatattttgaggagctacttaagcgtcaggcatgtaggaacagttttgtgaggtaaatattattttcatagtaacagctactgtttattaagtgccttttaagtacacgatactgtgttaagcgccttacatatgcttgcttccttttaaaactcaatgaatgagaccccgtctctacaaaaaattttaaaaattagtcgggcgtggtgacacatgcctgtagtctcagctattctgggggttgaggtggtaggatcgcttgagcctgggaggtcaagaggctgcagtgagccgtgatcgtaccactgaactccagacttggcaatagagccagaccctgtctcaaaaacaaaaacaaaaacccagtgagttaggaattattttctctttgcagaagggaaaagtaaggctagagaggttaagtaacattactaaggtcgcataaatggtaagaggcagattgctcatttgaacatgactctaatttttttttttaagactcatttctcggtactgcatgacgtggtcactccatagaagtcagtgtgtaaagttcagcagagacagtgcaggatgagtgtgtacaaaaagtgaagagagcctgggcacggtggctcacacctgtaaacccagcactttgggaggccgaggcaggtggctcacttgaggtcagaagttcaagaccagcctggccaacatggtgaaaccccgtctctactaatatacacaattagctgggtgtggtggcgcatgcctgtaatcccagctactcgggagactgaggtaggaaaattgctttaacccaggaggtggaggttgcagtgagctgagatcataccactacactctagcctgggcgacagagcgagactccgtctcagaaaaaaaaaataaataaaaataataaaaaataagaagtgaagaggaagatatttttagagaggaagaaggttggtaatcgaatagacttcagtatttcagtgttagtggagatgagaaaggggccacaggaagatttgaggggagagatgtgtatggggaaggtgatgtagcgagcattttggactggttgcatgaaggaatggacatcagcatgagagtgtagccttgtgaaaagacagccaatttacatctctcaagatctgggtgccaggcctggcaaggtggctaatgcctgtaatattacccagcactttgggaggccaaggcgggcagatcacttgaggccaggagttcaagaccagcctggccaacatggtgaaacctgtctctactaaaaatacaaaaattagccaggtgtggtggcacatgctggtaatcccagctacttgggaggtggaggtgggagggatcgcctgaacccaggaggcggaggttgtagtgagctgaaaaaaaaaaaaaaaaagatctgggttccagtccaaactttctttactaattacttttctgtttcctcttttcacaagaaatcatggcttttagacttcatttttgtatgcttcaggtaatggtgagaaggatctgaggagatagtcaatgtagaggaggagccaaaaaaaaaacaacctgaaaacatacataggtgtatgtatgtatatatatatacacctatgcatgtataaacgtatttttatatgtgtgtatatatgtattaggttggtacaaaagtaattgcagttttagaatcaatgacaaaaactgtgattactttgcaccaactgtatatataacatctctttgcagataacagaaatagcattaatcttttctttctttttgatcacttattattttgacaaatggtggtttagacagtcttgagaaaatatattatatggaagtcaggccaagttattggttcctataatccatcccactgtatcccaaagtgttgcaacaaccaagaagtggatcctctgattagaggagagaagaaaaatgtgtcatcaggaagctattttaatgatggagaaagggcccctttttggactacccatagctagttttaaattgcagagaggttttcctgctccccacccccaagaattgaaaatgaagggtaaattcacgaagactcctctctccaccctcttcctccctttcacccatctagatttatgtaaagcaatccattacaagtcttcatgtaccaggatttattatcagcatttatgagcatcatttcttcttgaaatagaggaagacttttttttaaccttttaaaaaaggcatgaggtttctcttgtgacgcctcaactcattgtggctttggtcacagtataccctgtatacagtagttacctagctcctctcaccatttctgctccttactagattattaattcttgttgaacagaagctttgtcttatgtatctttctgtctttataagcacagtacctggctcaaagttaagctcattaaaagtatacagaattgagaggctgttaagatttgttctcttccatcatggtctaaggagggttgggtagaaactatgagtagtgacattggaaagaggaaaagacagatcagcctcttggaaccaagagagaaggtaacaagggcctttaagggactaaaatactcccaagtattagtgctggcaggaaatcccttcctcagagtacagaatccctaccctggggccccaggaactctctcctatctcagtctcactcccagccctcgcttcactggaatcccaggtctagctcgggccacgaagcaagatcccagtgaatatgaagaggaacaaggaaatctcagcttgaattgtaataatccccatgtgtcaagggcaggaccaggtagaggtaattggatcatggggatagtttcccccattctgttcttgtgataatgagtgagtctcaggagatctgatagttttataagcgtctggcattttctcctgcttgcactcattctctctcctgccaccctgtgaagaggtgccttctgccatgattatacatttcctgaggcctcccgagccatgcagaactgtgagtcaattaaaccccttttctttataaattacccagtctcaggaatttcttcatagcagtgtgagaacagactaatacagcaagtaagagggcatattttctttcttttttttttgagacagagtctcgccctgtagcacagggtgaagtgcagtggtgcgatcttggctcactgcaacctctgcctcccgggttgaagtgattctcctgcctcagcctcccgagtagctgggaccacaggtgcccaccaccacgcctggctaatttttgtatttttaagtagacacggggttttgccatgttggccaggctggtctctcttgaacttctgacttcaagtgatccgcctgcctcagcctcccacagtgctgggattacaggcatgaaccaccgcacctggccatttacttatttttaacaaatataaaaaaaacttagaagtacttttgttcacttgtgactgtaaggccctagactcctccactgagaattttgttaccttagtggtttttcaaaaatgtaatagccaggcaggggaggggctgttatacatcatgagttaagtactttaaacttttgccaactgccctgagatccttgctatcttgtatagcttctgcaggaaaatgtctgctcagttttgccaaaccaacttttctttttttttttaaatcgagacggagtcttgctctgttgcccaggctggaatgcagtggtgtgatcttggcccactgcaacctctgccacccaaattcaagtgattctcctgcctcagcctcttgagtagtgggaattacaagcatccgccgccatgcccggctaatttttgtatttttagtagagacgggggtttcgccatgttggccaggctggtctcgaactcctgacctctggtgacgcacctgcctcggcctcccaaagtgctgggattataagcatgagccaccacgcccagccgccaaaccaacttataattaaacttttgggatgcaattcatgggtgatttggaaaatgctaacattcctaagtttagcttcctattacttagactacattcctgttgacatccagagaatggaaatggagttttgccgtatgacatcttttaacaaatacattccaattctattataatatggcatgttactacacagattaagaaatacttatgaaaccttggctctaaagtgctcctaaatccatacatacttgtatgtgttttcctctatttgaaacagctagcttgcttcctttcttccttccttttttttttcttttttcagggtctctgtcacgaaggctggagtgcagtggcacaatcacaggtcactacagcctcaacttcctgggctcgaccagtcctcctacctcaacctcctgagtggctaggcgcacaccaccacacccagctaattttttgtttttttcataaagacaggttatcatcatgctgcccaggctgtgaaacagttttctttctttcttatttatttattttatgttttatttcaatagtttttggggtacaggtagtttttcgttacatggatgaatactttagaagtgaattctgagattttagtgcacccatcacccaagcagtgtacattgtacccagtatgttttcttttatccttcacccctgcatccctagagttcattatattgctctgtatgtttttgcatcctcatagcttagctcccacttataagtgagaacatacagtatttggttttcttttcctgagttacttcacttagaataatggcctccagttccatccaagttgctacaaaagacattattttgttcctttttatgtctgagtagtattccatggtgtctgtattttatatatatatatatatatatatatctttttttttttttttgagagtctctctgtcacccaggctggagtgcagtggtgcagtctcggctcactgcaacctccgcctcccgggttcaagcaattctcttgccttagcctcctgaatagctgggactacaggcacccgccaccatgcccggctaatttttgtatttttttgtagaggcgggatttcaccatgttggccaggctgatctcaaactcctgacccaaatgatccacccacctcggcctcccaaagtgctgggattacaggcataagctaccatgtataacacattttatttatctactcattggttgatgtgaaacagctttctgtactacaaatagttctgtctcccattgaaattatgaaatttcgatgtatactacagggcatatagaccctcagtgatgaatgctttgcagtcattaaaaaaaaatatattgacctgcatttgttggtatggaatgatgtccacaaaatacattattatggaaaagcaagttataaaacaatataagctactcacattttgtaaataaaatatcaatatttctgtatatgtgtatacatgtgtctaagtgtatataacatgtatacacacagagtatgacatacaagcagatatttatagtttttgtttttttttttttgagacgaagtctcgctctgtcacccaggctggagtgcagtggcgggatctcggctcactgcaagctccgcctcccaggttcatgccattctcctgcctcagcctcccaagtagctgggactacaggcacctgccaccacgcccagctaattttttgtatttttagtagagatggggtttcaccgtgttagccaggctggtctcgatctcctgacctcgtgatctgcctgccttggcctcccaaagtgctgggattacaggtgtgagccactgcgcctggccaatatttatagtttctatgaaatacccgctttcctcaagcattagaaatccataaaaatcagtgtggatgctatatatcttagggaacttggcaaagatgggagaagtactatgtgtatgcagaacttcatttgaacaacatctagttttaagctgaaacagcttgtttttactgagactgaattttcttttttagcttttgaacatggagacagttaaacataatgcaaaagtagagagaatagtacaatgaactcccacgtagccatcatctagttacaatagtcatcaacctatggccactattgttacatctatactcccagttactttgcctccccacaggtggattattttgaagcacattccagatatattatttcatctgtagattttttaccgtgtatctctaaaagatagggagccatttttttcttcttacgttgtacatatcagttctagaatttgcattataatttccatttcttgttgagatttcccacctgttcactcattatgttcatcttttcctttaagtacttgaacatacatatttataacagctttttaaaaatctgttaattttattattgggtctcctcagagtctgtttctgttttgttgactgctgttttttttttattgtacattacgttttcctgctgcttcccatgtcatgtaatttttttttttttttttttttaagagaagggccttgttctgtcacccaggctggagtgcagtggtacaatcatagctcactgcaacctcaaactcctgggctcaagcaatcctcctgcctcagccttccaagtagctgggactataggcgcacaccaccatgtctggctaatcatgtaatatttaattttataagtggcatgacagataatatcttggtggagattatgttgtttttctttaacatatgttttaaacaactgccaggcaatatgttaaatctgtttgattctttcaggcttggtttttattctctgttaggatggatctatttgtgttttgctgttagttctagggggtggctgaggccagtgtgggctcatgtgttgtattgttttcttttaaggttcatggtcctgcattgcctaatatccagtgccaagatatagttgcttcacatattttgtctaattggttaagacaggtgggaattctagtaccagttatgctggaatggatggaaaaggatattaattttgttttttttgagacagagtctctgttgcccaggatggagtgcagtggcgcattctcagctcactgcaaccttcttctcctgggttcaagcagttctcctgcctcagcctcctgtgtagctgagattacaggcgcatgccacgacacccggctaatttttgtatttttagtagagacggggtttcaccatgttggccaggctggtctccaactcctgatctcaagtgatccacctcagcctcccaaagtgctgggattacaggcatgagccaccgcgcctagccggatattattattttttttaatctataagtttactttccctttttttttttttttgaaaattatttgttgaagcaactggttagcctattggttctgtggagctttgcattttgtggattttgctgatggtattatattccacagggcttgttgaagatgttcctctatgaaatggtagttagatccaaggcctgatttaagttagacattttttggtacaagtacttcatagtggtgttgctggagacattgtggcctggagacattggagacattagtggccattggcaatcatgacctggctcattaggagtttacaaatgacaatattttaattactccttctttatttatcagctagaaaacatctacaaagagaaactttctcatcaagtatttcattaccctgacaggccctgtcccagcaaggaaagttaaatggtttgttctccttatttatcagtttttaaaataccatagtcccccgcttatccaatgggggtatgttcccagaccctcagtggatgtctgaagccacagatggtactgaaccctgcacggtgctgtactatgctttttcctatacacacatttctgtggtaaggtttaatttataaattaggcagagtatgaaattaacaacaatcactaaaaatagaacaattttaacaatatactgtaataaaagttaggtgaatgtggcctttctctcaaaatatctttttgcactgtgctcacccctttttttttatgatgatgtgagatgataaaatgcttacgtgatgaagtgaggtgaatgagaaagcattgtgatgtagttttagactacatgtctgaaggagaatcatctgcttcaggtgatcctggatcactaagccatgacatgatgtcagaagcagagaatgtggatgactaatgggttgctagtgtgcagggtgtggacctgctgacaaaagggaggattcatgtcctgagcagaatggagtgggccagtgtgagatttcatcacgctgtgcagaacggtgtgtttgtgaattgtttatttctggaattttctttctttttttttttttgagacagagtctcgccgtgtctctcaggctggagtgcagtggcgcgatctctgctcactgcaaactccacctcccgggttcccgccattctcctgcctcagcctcccgagtagctgggactaggggcgcccaccaccgcgccaggctaattttttttgtattttttagtagcgacggggtttcaccgtgttagccaggatggtctcgatttcctgacctcgtggtccgcccacttcggcctcccaaagtgctgggattacaggcgtgagccaccgcgcccggcctggaattttctatttaatatttttagaccttgattgaccttggataactgaaactcttatctaagaggagactaccgtaacaggtttatcctccaaaagtgaccaatgaatttttgtttcgggtcattatatgggttaattttttttatatgggtttatttttaattgtgtatctacttctttaattttctgaaagtatatgaaacgtcatggagcattgaaattgtgaggcaggattgcaagattcaagatagaagagctattgacagaagtagcatttctaatatatggaatttaagaaactcttactataccttaatgttagagtggaagactgtagggtaagagaggattaacaagaaagtgagatggtgtctccattttaatctgctgcttgtgtgttctgaatgtattggagagggaaagccattgcagtcagttagaagataatggcagaaacagaaggacctgaactagggtaatgactgcgggatggaaagggagagatggatgccaaggaaatggtacagaggagaaatcatcatgacctggtggtttgctggaaaggagacccgaggaagggaaggggcatcaaagcagaaaaggaggagttggcaggaacagagaacttagtagggaaaagagtctctaagatgaaattgcaggatgactaagtatcagtgaatttggccactagtgatgatggcggcttggagcaaaatttagcagtagaaggagcttgtgaaaagtgacagttggtggtggttgtagagaattgtggaggggttttttgtcccttcttttttttttttttttgagacagggtctcactttgtcacccaggctggagtgcagtggcgcaatctcaactcactgcagccttgacctcccaggcccaagcgatccttccacctcagccccccaagtagctgggactacaggtgcacaccaccacacctggctaattttttgcattttttgtagagatggggtttcaccatgttgcccaggctggctttgaactcttgagctcaagtgattggtcagcccaccttggcctcccagagtactaggattatagatgtgagccactgcacccagcccttttttttttttttttaacaacttttttccttctttccttctttcctcttttttttttttttttttttaacagaatctcactctgtcacgcaagctagaggacagtggtgcaatctcagctcactacaacctgtgcctccgggttcaagtgattctcctgcctcagccccccgagtggctgagattgtaggcgtgtgccacctcgcctggctagtttttgtatttttagtaagagacagggtttcgccatgttggccaggctggtcttgaactcctggcctcaagtgattcacctgcccaatgtttttttttttttttttgagatgaagtctctgatctttcacccaggctggagtgcagtggcatgatctcgatctccactcactgcaacctccgcctcccaggttcaagcgattgtcctgcctcagcctcacgagtggctgggattacaggtacatgccaccacacctggctaacttgtatttttagtagaggtggggtttcaccatgttggccaggctggtctcttaaactcctgacctcaagtgatctgcctgcctcagtctcccatagtgctgggattacaggcgtgagccaccgcgcccagcctgtctgttcaatcttaacagcttttttgagatataattcacagtccatacagttcacctatttaaggtgtataattcagtgattttttagtatattcaaagagttgtgcaagcatcaccacaatcagttttacatttttatcaccccaaagagaaacctcttacccattagcagtcactccccaatctgcccatcccctcatccttaagcaaccactaatctttctgtttcttttttttttttttttggcgatggagtctcactctgtcgcccaggctggagtgcagtggcgcgatctcggctcactgcaagctccgcatcccaggttcatgccattctcctgcctcagcctccagagtagctgggactacaggcgcccgccaccacgcccagctaattttttgtatttttagtagagacggggtttcactgtgttagccaggctggtctcgatctcctgacctcgtgatcctcctgccttggcctcccaaagtgctgggattacaggcgtgagccaccgcgcccggcctaatctttctgtttctatagatttgcctctcctggacatttcatataatggaatcatacaacatgcagtcttttgtgactggcttctttcatttagcatgatgttttcatggttcatccctattgtggcatgtgtcagtttattgctgtataatatgccactgtatggatatatcacattttgtttatccattcaccagtttgtggacatttgggtcatttctactttttagttcttatgaataatgctactatgaatatttgtgtatgtgtttttctgcggacatatattttgttttggttttgaaataggctatgtttagatgcagagggaagcaaagaaactggtaaggatgtggtaaaattaccacatccacaagacaacgtttattaagtactgaaatattcctttatgaaagttaactcttgccatcccttttatctttcacatttagagtctatattatcacaaccttgtttttcctttgagtcagcattgtgatcattctggacgtggggtcccacacaccctgtctctgtcagtaagattatgattaagatcaaatagaaataggtcaggagagaaaagagctccctggccttattctcctcaaactagctgatgctcctgaataccaacctctttaagaattgatatttcaaaggacaactcctctctgtggtcttctgtcctctctcccctactttatgctctgtgcatagcagctgttcaggacatcgcccgagcgcaggggcactgcaatcagaaaagcgagtgagggacacagcaggagaaggctgttctggggctagtgagtgggagacgggacaaacagctagatagcaacgtgatggcttcaccatggggtgaagcgtgggggagagtatcaattacctagattttaaaaagagagcccttgaacacctctgtcactggtcacttttaccaaagccttctaacttaacggaaggagatgctgcactttaaagaaaaatcacagctgcggaagacagtcttgcaaagccagtttttgtggcttagtattttggggtagcttgtttcatgagggtcagattaattttctaatgttgttttctaccttaatgttactgctttaatcattagaatgccaccagttccttcaggcaataggaagctattgaagatttaatgagattcatactgcttatgcttaaatgttgatgacttcctgcatgcatattaatcattcctgaccttgatctcaaattccttcccggtacaaattctcattaaacatacctactagatctcccagtgttcactgaatacctggtttgtttccaaaagtacataaaagaacattaagtctcatgttcggtatgtgtcaaatgttcagttcccttgtctgatttgttttccaattcttattgtgactgtaaatctggagaatttaggggaagaaaaatcagtaactcttaacaggggatttagcctagtttacaagagtatatgatctgtgcagcagaccttgaacacagctaattgcttgtctaggtcagtatgtccaactggcaactctcagagcccatccaggccacagagcatttccgggtggcttgtgtgtgcgctccggctgtcgagcagcaggacttggcttctgttcccggcttcgttggccccatcttttagttcaggtccaccccctcctgcctcagaggcctgggaaacccagcctggccacctggtgtcctcatgcccagcatctacgcatctgccccagttgtcccctcagccaccttggcagatttcttgacttaacagttcttccctgaactaggaccgggggcaggagttattagagaagggagaggaaaggtgacaggtctcaggagtctgagggaagatgaaagtgagagcgaagtagtgtgggagagagggggatcacatccatgggagagaaaataaatatgtcaatattagggtggtgaggcctgtatacaaagacaggatggcagggagaagaagtaggcaaggacataaaggggcttgggtatgcagatgctggtcactgaaatgaggaacaaaggagggaaatttgcgtgtgaaagaggccacatgtgagagaatagagagagcaaaatgacagctttgcttggcagaacgtgaccatgcacagcattgggagacacagtctgatgaagcattttttccaatttgtaaatatatttataacaaagaaacattatactttttttttctttttttttttttgagacagagtcttgctctgtcacccaggctggagtgcagtggcgtgatcttggctcagggcaacctccgcctcctgggttcaagcgattctcctggctcagcttcccgagtagctgggactgcaggtgcgcaccaccatgcccagctaattttttgtattttttagtagagacggggtttcaccatattggccaggctgatctcgaactcctgacctcaagtgatctgcctgcctcggcctctgaaagtgctgggattacaggcgtgagccactgcatctggactacttttttttttgagagggaatctcactctgtcacccaggctggagtgcagtagcaggatcactgcaacctccacctcctgggtgcaagcgattctcctgcctcagccttcccaagtagctgggattacaggcacctgccaccatgcctggctaatttttgtatttttaatagagacagggtttcactatgttggccaggctggtcttgcactcttgacctcaggtgatttgcctgcttcagcctcccaaagtgctgggattacaggcatgagccaccgtgcctggtcagaaatttattattataaaaacacaaagagatatatacttagcatattacattacattgggattattttaggttgtcccaaaggtgtagtcatttgattcagaggcatagcctgcttctgacatgttggttgtttaaaatgtggcctgttctgaccaagaagttggacagtattggttttgatgactatcttgccacttattttttacaatgtggtaatttttacatccagatagtttttcgtctttttttctttttttgaatcagagtctggccctgttgcccaggctggagtgcagtggtgcaatctcggctcactgcaacctccatctcccgggttcaagaaattctcctgcctcagcctcccgagtagctgggactacaggcgcccgccagcacacccggctatttttttttagttttagtagagatggggtttcaccatgttagccaggatggtctcgaactcctgaccttgtaatccgcccacctcagcctccctaagtgctgggattacaggcgtcagccactgcgctggcctagtttttcatctttttaaagcacatttccgctgatataatttgactggataggtgaaaagatatccattttgcaaagtagattttttatatttaatgatcaaaatctttatcttttaaaaacaatttttataaaatagccacaaaatttcataccctttaacttatttacttaattccacttctagaaatctatatttagaaaataattaagtcgggcgtggtggctcacgcctgtaatcccagaggtcaggaatttgagaccagcctggccaaaaatggcgaaacctcgtctctgctaaaagtacaaaaattagccaggcatggtggcgcccacctgtaatcccagctacttgggaggctgaagcaggagaatcacttgaacccaggaggtggaggttgcagtgagctgggattgcaccactgcactcgagcctgggcaacagtgagactctgtctcaaaaaaaagaaagaaaataattagagatgctgccaaagatttaggttcaagaatgtttattacagtgtcgcttatattaatattagcaaagaactggaaatagtctaaatgtccaataaaatagagaaatgattcagtaaattatgatttattcataagttgagatgggctgttgtatggtcattaaaatactgcctattaaactattatacttcctccagtttattctccacactgcagtcaagtgacctttgaaaaagtacattgtggccagacatggtggctcacacttgtaatcccagcactttggaaagccaagatgggaggatcgcttaaggccaggagttccagaccagcctgggcaacatagtgagacccccatctttataaaacatttaaaaattagctgggtatggtggcatgtgcatgtagctactcgggaggctgaggtagaggattgctttagcccaggagtttaaggctgcagtgagctatgattgtgccactgcactccagcctgggcaacagagtgggactcttgtgtcttaaaactataaaaatagagagccgggcatggtggctcatgcctgtaatcttaacactttgggaggctgaggcgggcagatcacttgaggtcaggagttcgagatcggcctggctaatatagtgaaactccgtctctatcaaaaaaaaaaaaacaaaaaaagaaaaaaaaaattagctgggcgcggtcacatgtgcctgtaatcccagctacttaagaggctgaggcaggagaattgcttgaacccaggagtccaaggttgcagtgagctgagatcatgccactgcactccagcctgggtgacagagtgagaccctgtctcaaaaaaaaaaaaaaaaaaaaaaaaaaaaaaaaaatatatatatatatatatatatatataaatagtccaggcgtggtgactaatgcttgtaatcccaccactttggaaggccaaggcaggtggatggcttcagcccagaagttcgagaccagcctgggcaacatggaaaaaccctgtctctacaaaaaaaaatacaaaaattagctggacgtggtggtgtgcacctgtaatcccagctacttgggaggctgaggtgggaggattgcttgagctggggaggtggaggttgcagtgagccaggatggcgccactgtactgcagcctgggcgatagagccagaccttgcccccacccccccaaaaaagaaagaaagaaagaaaaatatgaaaataaaataaattttaaaagtacattggatcatttcactcccccttaaaatcttttcttggcttctcattgtagtcactgtaagttcctgacctccaaggctctctggcctcatcccttcactctggtctccagtccttccactcctgtccactggcctgcccctcaggtgctgtaattctctaggccctttcctccttgggatctttgcatatgctattcctcgtgcttgaaccatcttcccccagctcttcatctggctaattcctgcttgttcttgaggtcttcatctcattgtcactttaagagagggatttcctgacctctctacccaaaggaggggcctcagatatattctgtcattgtggtctatgcttctttgtaacgtatatcacattttaaaatcacgttcatttgtgtggttctttaattcccagatcccctctggacttggtctgtttcctttcttttctggaggagttcctcaagtttcttctctatcccttcaattgaggttttcatttctgttgccatattttaaatctccaagagtctgtcttgttccatgaaaggttttacacacacacacacacacacacacacacacacatattttatatatatacacatatataaaacctttcatggaacaagacagacatatatatgtgtatatatatgtgtatatataggtatatatgtatatatatgtgtatatatatgtatatatgtgtatatatgtatatatgtgtatatatctaaaacctttcatacatacatatatataaaaggtggctcacgttcacctgtattaaactgtaagttccctcagggtaaggactgtgcttttttcatcccatgagtggtaagtggtagatttctgactaacaaaattaccagacatgaagtatgagggcaaaaaaaagttaaaggaaaaattaggaatatggacaaaaatgtgattcatggatagtcttcaaagattaacagtgttgtcttgcccagaatttaatagagaaaaaaaaatggacttgcagaaaaacttgaggcccttcaagctgtcatcatatcagaggtgataagacccagtgaactgtttgagaaattgggtaattgtcactaggtaaaggaaaaggattgaaaattagataagggttagtcccacaaaagaaattttaaaactgggctgggcgcggtggcttacacctgtaatcccaacactttgggaggctgaggcgggtgaatcacgatatcaggagtttgagaccaacctgaccaacatggtgaaaccccgtctctactaaaaatacaaaaattagccgagtgtggtggcaggcacctgtaatcccagctacttgggaggctgaggcaggagaatcgcttgaacctgggagcaggaggttgtagtgagctgagatcgcaccactgcactccagcctgggcgacagagtgagactctgtctcaaaaaaaaaaaaaaaaaaaaggaaattgcaaaactgaagtaaaatgaaacaaaatatgacacgtataagggcaatatttctggccaagatgcaacaaaattcatttcagaagtccaaagttcaaatacacatctacccttgctgcctctcttgtagattagggcatgaccctataagattagagaacaggagaggagacaacaggaaacaagcaaaaaaagaccagaagctgaaaagcagataataggaagtaaatggcagcagaaccaagaaaacataatcctgttcaggtggtagagaaagcaagaattcccaggaatcaactggtggcaccaggtatctcttgatacaagagtgaagtggaactaaaacgaagaactgctaacctccagatctcatactctacaaaatgtaatgactacccctctaccattctggcagaattattcttaggagagagtaaaacactctcaagagagaataaaacagagaggtctctgactggagaaggctagcaacatagtatcccggttaagggtggggtactatgatgagtgatgagggagattaagtgaacaactgcatacttggatgctaggacaccccccatccccctctcaccccaccgccacctgctgcgggctattacctttctgccctcctatttatcttccagaatgtaggtaaatttcaccaatttctccactaaaattctttttgttttccaggatccaattcggtattccacaatgtaatttagttgtaaagtcttcttagtcttctataatcttctgacagttcctcagtctttccttgtctttcatgagtccactgagggttttaaatcccccactcttacatagaagcagacaaccatggatttccagatatctgagaacgcctctaatataaaagacaaataccaaacaaacaaaagaaagaagccaggcgcagtggctcatacctgtaatcccagcactctgggaggctgaggtgggaggatcacttgagacgaggagttcaagaccagcttgggcaacacagtgagaacccatctctacagaatatttaaaaattagctgggtgtggtgatggatgtctgtagtcctatctatgaaagagtgtgagataggaggatcacttgagctgccactgcattgtactccagcctaggttagaaagaaagaaaaagaattcagagactacacagagaagaaattttctagaaaactattaataatatactcaagaaaaattttccaaccgcaaaacaagaatagaatactatttttaaaaactttcatggggctgggcatggtggctcatgcctgtaattccagtactttgggaggtggaggcgggaggattgtttgaactcaggagttcaaaaccagcctgggcaacatagagagacccctctgtctattgtatatatataaaatatatacatattatatatttccaaggaggaaagggcctagagactatatatatgtatataatctccaagaggccaggtgcagcggcctcttccgtcaagccttagcacctataaactttataaaacctactctctgtgaattgtgcatgccactaatcttcatctagcaatacatttctgctcattctttaaaattcatctcaagtaccatttgatttagacgagccacctcttggttccagtggcttcctgatcatacctctagtgctatattgtaaccatcacttaattagttcatgattttttctcttctagactataagttacttgaacatatggatttgagtcagtaggtataggtgagacatgggaatctgcatgttcaacaaattcctcctggcattctagggctccaatctcaggtatgtttgtttcttttttttagacaagagtcttgctctgtctccaggctggagtgcagtggcgcaatcttggcttgtcgcaacctcccgggttcaagcaatttgcctgcctcagcctcccaggtagctgggactacaggcgcacgccatcatgcccggctaatttttatgtttttagtagagatggggtgtcaccatgttggccaggatggtcttgatttactgacctcatgatccacccgcctcagcctcccaaagtgctgggattacaggcgtgagccaccgcgcccggcctaacctcagttttaagtggtttttaaaatctacttcaactctgaaatatcaaggcttttcctccctgcaatttaactggtattggggagggcaggtaaagctttcgggtagttgattaaaaacaacaacaaaaaaagcaggggccgtcttctttcgtgcccacaataagagcttatactgaaatgtagagtaaggtagataagtagaaataagataaatacccttatttcatttaacagtgtttgcacaatgtgtccaatttttattcactagttctaaaactattgagggcttactatatgccagacactgttctagtcattgggagtacatcaacacagacaaaaccccctaccctataggagtttgcattggtaggcaataagcaaataaaataagtaaagcaaagtattttagaaggtgataagtattgtggagaaaatagaacatttaggggagctttcttttatttgtcagtgtttagtaataaattactagagagagtaatttttaaaaatttgagctatttaaataagccatactttaaaaggcaggatttaacctacatctaatcagaagagaacttgggatttgcaaaattcaggtctggtttcctgttataaagttgacagtaaatggctttcccattatgtcaataggaatgaaataatttagtggctcagggaattgcttccaaggagtcaaaagtaaattgtgtttatataattttttttactactattaaaaaaagccacaaaccagaaaaaaattgttttgtacttgtctacaaggcagagttaattttatcattaaaaaaaatcctatactctaaaacctcttctattatctcctcacttcttcgttttaattttttgtttgcattttcacgtttaggtaaaaagatattggtccttttaggatatatggggatagaattatatgaggaagcacaggactcctggtatggaatgaggaagctggagatttgagcttaacctctctggggtgcttagaactaagtaagagaagcagtctgtttctgcagggaaaatcacttctccatctttactctcaaataacttacttaatcaaatggtctaatgtttcattgtaaagagtcttaaaagtcaaaattaatgtcacctgcagagtaagctaaacgagtgatgagctttgttttgcacagcagttgaaactgattttcaaagtcccaccaaacagtaaaagacttttcttgcatttctgaaaaactagaactgtgtggtgattctgaagactgtcagttcctgtggggtgtttacacaaaggtacttttaaatgaagagtcatttttagagcaattagagaaaaggctagacagagaagagcggctcaggggcttggcaggtcggggttaaggtttattgacaggacagggtcaggcgtctgcttagccaccactgccccgagtacctgccctccggatacacccaagacctccctggccttggctccctgccataggccaaactcccatgcagaatgaggagaggggaaaggaggaagaggagagcaagttctgctggttcagtattgaactgcaagtatgaaaatgtttgtgtatatttttctggcccagatgttgtgttaacattaggaagaagaaactttaaaacaaagaattgtctgttctttcaactttgtagtttgcagtttgcatcctgaagaaagaaattgcctagctaaagtagtcttttaatttcattttttagttttgagttacaggtttctggcaagctccctgaccactactgttacctggtggcgcctatatttcatcaaatttagacatgcagactacctggatccaggcccagatgaactgttgtgactgataaacatgatcccaccctgcccccatgcagactcctgcttttccctttaagggaatctaagacgttgagtcgccggatccccaagggagttaaagaaaaatgtcttccggcattcacatttgctctgtggttttcttgagctgcatctctgcttgcccagaggctggtgaacatcccagcagtgccctgacttctccagtgttggtaactaatggagggaaatttttttgtttttaataaaaacaagcagagacatctatcagtactcacagacaaggcagaatttgtttgacatcttgtgattgctgcgtacaaaaagaatgacagcagttattaaacaaataagaaaaaagatgctgtttattgatagttttcagatatcctaagaatatttttagtaatcttactgcctttgcttgcataagtaaaaaaagtggaattgttaatttttgcaatctgggttgtattagatttggaatcataataaaaatgtaaatattaagcaaatatgtgctgtttagctatgtaacatactcgtggcttttccttttattagaatttatttcaaatacttgtttttaagatggtaaggtgagtattagcagtcaatgcaattaaacttaattgcattttctatatgaattgtttttgtctctttttaaatgtatttatggttctttttctccatactagctattcctataggtttgtcttgacaaaaaattataaacaattgtttgtttgcagccgggtgtggtggcttaacatctgtaatcccagcactttgggaggccgaggcgggctgatcacctgaggtcgggagttcgagatcagcctgaccaacatggagaaacctcgtctctactaaaaatacaaaaaattagctgggcgtggtggcacatgcctgtaattccagctactcaggaggctgaggcaggagaatcgcttgaacccaggaggcggaggttgcagtgagccgagatcatgccactgtactcctgcctgggcaacaaaagcaaaactccatctcaaaaaaaaattgtttgtttgcttggaaacagtctaaagtcacaaatttgatttcagtttcatttggaaattttaaaatgaaaaattgggacacagtcaagtgggaaaagcatttaaactgttcagtgactgaactttcgttttcatatcatgttaatgtgatctaaaaaaaataatttcttcctggcctaagttaccccacttgaggattgttacagtgatttcaatccctgacctcaccagatgatgtggaagcatcaggccacatatttttataagtactgggtgagggcaaagatttgcttggaagggaggagagaacctcctggaaggttgataatagtttgtatcttgatagatgttggttacaccagtacatgcattcgtcaggactcatcgaatggtaccttaagattcgtgcatatcatggtatgtaaattttacctcaagacaccaacaaaggaacttataaacatatattaaaatctagcatgttgaagtattataggagagtgaatactgatcttgatctttaaaacttactttgaaatgcaccccccaaaaaagatgggtgaatggatagtgaaacgtttagaaatgtggtaaagagtaagtatagtaaaatgttaattgtcaaatctaggtagtgtgagtgttcactgtaaaattcttttttttttttttttgagacagagtcttgctctgtcacccaggctggagtgcagtggtgtgatctcagctcactgcaagctctgcctcctgggttcacgccattcccccacctcagcctcccaagtagctgggactacaggcgcccgccaccatgcccggctaatttttgattttgtatttttagtagagatggggtttcactgtgttagccaggatagtctcgatctcctgacctcgtgatccgctcaccttggcctcccaaagtgctgggattacaggcatgagccactgtgcctggcctcattgtaaaattctttcagcttttttgtgtgtttgacataaaatgttgtgttccataaaatgttgggaaaaaatgaaggtactggtttttgctcatttaaggatctgtgtacctccattttaaatcccctccttaattcaaaatcagaccacttggattaataccaaaaaggggaagggtgtgaaagtagccatttagataaacagaaaaatgtacccacctcatactttctctagttacctgctgaaagaccattaccaagcatggaggcccagggggtctttacaaacaagaataattctgagaaacccaaaccacaaagcccaaccaatgacctctccaggcagataaaaattggcctccagaaccctaaccatgaaaaaagacatgacttcctacatgtaatcttcaccaatggcaagcaggtaaccccccgctatataccttatactaagaccctatggaatgaaaatgggcttttggttttcagccaaatccccaggatttggccatgaacacctccactttatcagaatgccaagctatttcttacatcctgataaagcctcctttttaaagacatatagattgtgtgtgtgtgtgtgtgtgtgtgtgtgtgtgtgtgtgtgtgtgttttaatcttgaagggtcaaaaggataagttggttctggtagaatttgagccaaacttttaaaagctaatgataatatattttttaattaggccatattgctcagttgatgcttgagcagtaaactagaaaatcaagatttgagaggctcagtgatctcaattccttcagggtctcatagtgaactctggccagttaatttatctccaaactttgattttctcatttggaaagtgagaataaagcctgacacaaaatggctagcccatggttctcaaacttttgtgtatgtaggaatcattggttaagaaaccttggtgtgtgtaaacataatttagtttattaaaatagagattcctgggtttcaaactgggttttctcaatcaattgttctagggcagagcccagaaatctacattttaataagcacctagtgtgatactgatgcaattattggaccacaggatatatggtgtagatgtgttttgatgggtattatattaactgagaatttttttagctttttgttatggaaaaaaattattattattattattttgagacaagatctcactctgtggcccaggctttagtgcagtggcacgatcaaggctcactgcagccttaacctccagggctcaatcaatccacccacctcagcctcccgagtagctgggactacaggcaagtgccaccatacctggataatttttgtatttttttgtagagatggggtatcgccatgtttcccaggctggttttgaactcctaggttcaagcgttctgcccacctcagcctcccagggcttccaaagtgctgggattacaggtatgcaccatgttatggaaaattttaaatatgcattagagagaataatggtatgagtctccatgtaagagatagaagcatcacccaacatccatcagatttttttttaagagtctgggtcgcttcgttgcccaggctggagtgcagtgacacagtcagctcagtgcatcctcaaactcctggactcagcgtgcctgtcttcacaacttcaataatcttgattcactttgacattcaccctttcctgcatccctcctccaaggtgatatgtagaagcaattgttagatatatcattacatctagtaaatattttagtaggcatctctaaaatattaaaatataagtactcttttaaagatatatgatggttaaaccttaccaaatttgagagtaatttcttagtatcaaatatgtcagtgtctagatttccttgattatctttttgtttgtttgtttcagttgttttgttagaattaggaaccaaacatattcccatgttgcatttggctgatatgtctctaatcgtttattctataggttccttctctctctgtttttccccttgtggtttatttgttgatgaaaccaggtcatttgttctatagattttctcagtctagatttcgctttttgggtccccatgatgtcatttacctttttttcccctcctgtttcctgcaaattggtggttccatcacttccctcctgaagtatgatcagattcaagttcagttttctggcaggaatacatcacagatagcgtcttgtacatctttcaggaggcacacgtttggttgtctcactttttgtcatgttagcaccattgatggtcatggctgagatcctttatttccttagggagagccccatattttaacttagtgagtagctcatgaatctctccccttcatcatggagttttttcttttctaagttagacttctagagctttcacagatttcacagtgagcccatagcgcctacctagacattctgtttgctgtagaaaccagaaaggctttcttgctctcatatcttagtttaatttacacaatatagtaatctttaaaatttgtcctagtgtcccccaaatttgtttctatttctgagacatgttaagatgaatggatgacagaacagaaagttgagggctctagagtgaaatcacagttgcaggtaagttgacgaggtgcaagtacaaataagacacagtcaccaattctgtaccaacatcctatccagagggaaggggataaatttttattatctatatttacttattttgtcctgacagcaaacataaggtttctgggtcaggagcagacaattatgacttagagcattaactaagtcaattccccataccccagtaccctccttcagggcaacataaaggggtctagaagaagagggcctggaagaatgaggttggatatgccaagattactccaggaactgagaatgaatggaatcattcctttattcagcaaacccactgattgtcggctgtatgccagacactagggtagatgataaatactagaaaactcccaacctaacacacaaaaccatatgcctctgtgtctagagttaggcatcaggtgtcatcttgtgcttataggtaaatcacatacccacagttacatgccctgcaatgacattttggtcaacaatggactgcatatatgatggcaggtcccataagaatataatgctgtttttacagtaccttttccatgtttagatacacaaatacttaccattgtgttccagttgctgaccatattcagtacactgacatgctatacaggtttgtaggctaggagcaataggctatcccatatagcatagggatgtagtaggttataccatctaggtttgtgtaagtaccctttaggatgttctcacaatcacagatcacctaatgatgcatttctcagaatgtatccctgttgttaagtgatgcatgactgtatttgtgtgtgtaaggatatgagtgtgtatgtgtatttatgattttgtacgtgtacacgtgtgtatgtcatattcccttctgacttaacattataatttctgaaaatctttttcttcatttttaatttgtcttcagttgtcgtttgtgctaaagtttgcatgaagttttcttatccctcactttccaggtagcagtggaatttactctctaccttctgttgtgtctgctcatgtgacaagttcttttggtaagaaagtaaagtctaaactataaaagttaaactctgaaagaagaaaattcaggtgcaaagtgacaaggatttcaccagactgaagagacctaaagaaagggagggccagatccctcagctgcaagtctcttgatttggtgagggattaaatgtgctaggtcccctggtactagtgggggctggggtttcagacctcacggagttgccattctgatggggaaacaatagacgcaattagacaaacaaacatgataacttcaaaatgagaaacgtgcgtttagggaaataaacaaagctaagagggtgccagtaactaggggggaccactttagagagagaggtcccagaaggcctgctgatgaagtgacatttgagctgaggctcaaaggccatgaatgggccagtgatgtgagaacttggtgaaagagcaaatgcagagcccagaaagggcttagtgtctctgaggagcagaaagggggcccctgtggctggcggcagtgagtgacaggagggtggagtgccaggaggccagagggaggtggggtcagaccattgcaggccctcaaggccataatgggaagttgaaactatgttcaaaaagcagtggataaacattgaagagtttgaagcaggaaaacttagtaattattctcacctagactttttttcctacacatgagcagacttctgtatgtgtgtctgtgtgtgtgtgtgtgtgtgtgtgtgtgtgtgtgtgtgtgtgtgtgttttcttagtggtaacatgctgtgtatataatatgcaacttgtttttcatttaccaataatatcttggtcatctctgaaaggaagacttataaagaaaaataaggtttgccacgaactatataacaaatttagacatgcaaaaatgtgaagctgtgatggaaaattagtttcttaggaataaaaaaggaaggagagtgcttgtttttaatgtctgttatacctatgaattccctgtaataatttaaggacattaaaaatgtattctaacttgattcttgattttctcataaacttgccatgattagtatgttactttaattatgtatttattgttaaagcatctttacacaccatttttagtcttctaaaatatagcagagactgaacaaagtaggaaaatagaagaataagaattcagtagacatgcatggtcaaaccataacaaacccaaagatactgagactctagagagaatgtgtcacctttcaaagtactgcttactattgccagtagttataaatgtacttattagctgggcatggtggtttacgcctgtaatcccagcgctttgggaggctgaggcaggaggattgcttatctctggagtttgagaccagcctgagcaactaggtgaaaacctgtctctactaaaaatagaaaaattagccaggcctagtggcatgtgcctgtggtagtgcacgcctgtggtcccagctactttgaaggctgaggtgggagaattgcttgaacccaggaggctgagtttgcagtaagctgagatcacaccactgcactccagcataagggatagagccaaaccttgtctcaaagaagaagtacttatttatttgcttttaaaatatacttttgtgaaaagatatacctaaaatccccagcacattttagttcttgcccatttacaaaatagtatatagacaaaagcctgactaagagaaactgtcaatattacagcgaaacagagatagggattgttttctggtcttagagttaccataacatgagcatctgtggtgagcaaatattttccagaaaagcaggtgaatgaaaaaactatagcccacaaaaataaccgcctcaaactcatgatccctaatgtaggctcatttttaagtctacattttatttttatttctacttacttacttatttattttttgagacaaagtctcactctgttgcccaggctagagtgcagtggcaccatctcagctcactgcaacctccatctcccaggttcaagcaattctaatgcctcagcttccctagtagctgggatttacaggcatgcgccaccacatccagctaatttttgtatttttagtagagatggggtttcactatgttggccaggctggtctcaaactcctgacttcaagtgatccacccgcctgggcctcccaaggtgctgggattacagacatgagccgctgcacccggcctttaagcctacattttattttattttatttatttatttatttattttttttgaggcagagtttcactcttgttgcccaggctagagtgcaatggtgtgatctcggctcaccacaacctccacctcctgggttcaagcaattctcctgcctcagactcctgagtagctgggattacaggcatgtgccaccatgcctggctaatttttttttatttttattagagacggggtttctttatgttggtcaggctggtctcgaactcccgatctcaggtgatctgcccacctcggcctcccaaaatactgggattacaggcgtgagccaccacacctggcgtaagcctacatttttaaaaaaatgtattgcagaggtggaaatgaactaaagtaggcatgaagtaagggtcgaggtccaagggtgtgtgacacaacattgctaccatgttatagagggatattctaaacaaaatctctgcattcttaccccatgaaccctatcttcagcctttaccactggaaagcatctttctaaattcaaatccttgatttgcttctggttttgtaataaagtcatgagcaataggaatgcagccagcaattacgtttctgcttttgtcttaaattggagaccatggagcgacatcaattcgcaggaaatatactgtttcttaagaaagtctttcatttaactttcttctgtacttaaaattggaaatatatttagcttctctaaatatttagttgtatgtgaaccagttgttaaagaatgtcttaattctacagttaagctcactcacatgtatgtatgtctcatacattaaaaatgtcatcctgctgtgtagttttaagaaattacttttcagaagtaaagactttaggtatgataatgataatttaggaaatgataatttaggaaaattttctcaagtactcatcatttttaaaaattcataattcagaaatattttattgggagactaaagacatttatagtattttcccccagagtgtcatatttttataaaacaggttattattaacaaatgatataatttgaaataattggaaaggtccactggccctaaaatatgtcccctacagccttcttggaacataaaatgtccaactacgtattagaattttctttgggttaatggagtatcctcataaaggcttagtttaataggagttatcactctgggttttgccaagattgctttagaaggaatgagttgggtatgttttcagtagtcttggtgaagaccccagaggaagagcagagggtagggatcttggtgggagagaagggagacactcccctaccaggggctccaaaagagggctttaggttgtaggaaaggtgggcaaagcctgtcctttataataataaaatgtttagttagaggggagccatatttaaaactatagcactagacttatctcagttgtaaaatggatattatataataagatggaggaagtcattcacatatgctttctctctctttttgagcacaataccaaagtgtttccagaataatttggcaccttcacttcctgcacagacttggagtagagtccagaaaacagtctagttgaattctcagatgggtttttggcaagaatacaaagtagctttatacagctcatctctgatgcttttcactgagtgtctgaaagaaaagggaggatttgaggacctgatttaaacaaggaagtaacccagtgacttaaagaggagtgttgtggaattcgaatcccaaaataaagccctacgtcgttgacttttcagccatgggaataaccagttgcttcattgtgtgttttgtcaaagtgcctcagccatttggtcggcctgatggttacctgctgcctctattcatagtttctgcgtcctttcttgttgcccggctggtcaaacatgtgtaacggtgccctggggcaccaagcatgccctcggggagctaaatgctgccagatgtagggagcaagggttgattcacatagccataatttcaatagctaattttacctgttttcttttggttttgggtttccttcttaaagaaaaacccatttggagttgagtttttccccctttaaattgcagtcttatcttgttacctctaatctcccagcctcatcccactcccgaaataaaagtgtgagaagaaaagaatagaaaagatacgtgatttattaagtctgagagattaatagttttactttatgataaaatcagtaaaatgtttctgttttactggattctgattagtattcttatttcaaagtgaaattatgtttcacttgactcaaccttccctgtagaaatcatttagatagaaatagatcatcttctagatagatactttatgtaatctctgattaggaacactgaatttgttgttgaaagccctatattttttaactcactcttgaaaactggttaagtagaaggaaagaatcaagcccttaacttgatatatcctgtatggaactgaacctcaggatgaccaaatatttgatgaaagaaagtttctctttttagaagtatttctgccaacaaattaagaaggtctgagagaatatcaccatttggcaaacccctcgtgaaataatgaatctatctactggtcatcaatggttgctaacatcacaaaaagagccacagctatcagagcacaccactgtccattaaatattcttgccaaaaaaattgaacttgaggccgggcgtggtggctcacgcctgtaatcccaacacgttgggaggccgaggcaggtggatcacgaggtcaggcgatggagaccatcctggataacacggtgaaaccccatctctactaaaaataaaaattagctgagcctggtggcgggcgtctgtagtcccagctactcgggaggctgaggcaggagaatggcgtgaacccgggaggtggagcttgcagcgagctgagatcacaccactgcactccagcctgggcgacagagcaagactccatctctaaataaataaataaataaataaataaaaataaaaaaatcaaacttgaatcagaacaaatccctagatttaatatgtctacaggaaatacaaaggacagagaaacatattaattgacaccaccaagatacaactggtaagttacagaatgtgagaagtgctagggacaaattcattttcttaacaaataatttacgagaaagaaaaaagggaggaattcattaaaactggcataagagacatagcaatcaagtacaatagaccttatttggctcctattttaataatacatttgtttaattttttttttttttgagacggaatctcactctgtcacccaggccagagtgcagtggtgcgatcttggctcactgcaacctccgcctcccgagttcaagcaattctcctgcctcagcttcccaagtaactgggattacaggtgcctgccaccatgcccgggctaatttttttgtatttttagagaggcaaggtttcactacgttggccaggctggtttcgaattcctgacctcaagtgatgtgcctgtctcggcctcccaaagtgcagggattacaggtgtgagccaccgggcccagcccatttgtttaatttaaaaaagaatatatgacaaaaggagaatatctaaaggctgataaaatatttgatggtactaaggaactattgttaatttctaaaggtataatattatattattaaaccattaaaaagagttctcatcacaggccgggtatggtggctcacggcctccagcactttgggaggccgaggcgggggggatcacgaggtcagggatttgggaccagcctggccaacatggtgaaaccctgtctcaactaaaaatacaaaacattagctggcagtggtggtgcgtgcctgtaatcccggctactcgggaggctgaggtaggaaaatcacttgaacccaggaggcggaggttgcggcgagtggagatcatgccattgtactccagtctgggcaacagagcaagacttcatctcaaaaaaaaaaaaaaaaaaaaaagtcctcatcttttggatgtacacatggaaatatttacagttgaaattatatgatatctgaataggcttcaaaattatccagtgggaagggatgatggttatggatgaaacaagattggccatctattggccattgttgaagctgaatgatagatacatggggatttgttacactaatctacttttgtgtgtttttgaaattttctataataaaaagtttttaaaataggcttaggtaaatcccagatttgccacttgtaaatttgtgatcgtggacaaattcattagcctccataagtctcagtttttgtgtgtgtgtgtgtgtgtgtgtgtgttatttctggttagggcgttgcctataaaataggtacaaggttattttcccagtttaccacctggtccgggttgttgtgccaaacttaataatatgtatgatgttactttgtaaattgccacaaatatatcaactgttttattattatgaagttcctgaaaggatccaggttttctgcttagaaaatttagtagctttttctgcttcaacaagcagtatggctgtctacatagattatatcaactaaaaagctctggaataagaatataattatgtatccaacaagggttttatcaattagtttgtagtaatagagtaattataagacttcattttaaaaaatttgcaaatataaatttctcatggcctagtaaattaaatgtcgtgtagacaactgtgctattaatgttttccctgtatagtaagaattgtgaattatttctgatttcttatttttcttgattggaagaaattgcttgaatttaacacatcaataaagattttaaatttattccttcaaaatatagagaaaccctgattgttagaatttttttcttttttttttttttgttgttttattttctaattctggcctcatttcttccttcctaactcccagcattttattgtgaaatatgtagagagaaacgtgtaaaagaaatatacaatttaatgaatgattatgaagcaaatacctatgtaactactgtactgtgttttttttttgtttgtttgtttgtttgtttgttttgagacggagtctcgccctgtcacccaggctggagtgcagtggcccgatctcagctcactgcaagctccgcctcccgggttcacgccattctcctgcctcagcctcccgagtagctgggactgcaggcgccggccaccacgcccggctaactttttgtatttttagtagagatggggtttcaccgtattagccaggatggtctccatctcctgacctcgtgatcctaccgcctccgcctcccaaagtgctgggattacaggtgtgagccaccacccccggcctactgtactgtgttttaagaaaaatcagaatatcaccagcacctcagaaaacctctgcatgcttcttcccagtccaaatctctttcatcccctgggtagccactatcctgactttagtagtattcactttcttgcttacctttatagttttaccacttgtgtatagattcctaaacagtgtgattttgtttgtttgtttgttttgagacagggtcttctttgtcacccaggctggaatgcagtggcatgatcacagctcactgcatcctcaacctaccaggctcaagtgatcctcccacctccacctcccaagtagctgggaccacagatgcatgccatcatgcctggctaatttttaattttttttagagacagagtcttcctatgttgcccaggctgatctcgaatgcttgggctcaagcagtcctcccacctctgtctcccaaagtgctaagattacaggtgtgagagaccacactgggactgatttttatattttaaggatccatttatattgtatctgtagtgaattcattttttttgctgtatagtcttctgttttaagaatttatggctgggcacgatggttcatgcctgtaatgccagcactttgggaggccaaggtgggcggatcactaggtcaggagatcaagaccatcctggctaacacggtgaaaccccgtctctactaaaaatacaaaaagttagctgggcgtggtggcgggcgcctgtagtcccagctacttgggaggctgaggtaggagaatggcgtgaacccgggaggcggagcttgcagagagccgagatcgcgccattgcactccagcctaggcgacagagcgagactctgtctcaagaaaaaaaaaaaaaagaatttactgtaatttattctgtagttgatggacatctgggttgtttccacctttttctttttttttttgtcgcccaggctgaagtgcagtggtgtgatcttggctcaatgcaagctccgccttccgggttcacgccattctcctgcctcaacctcccaagtagcagggactacaggcgcctgccaccacgcccggctaattttttgtatttttagtagagacggggtttcacagtgttagccaggatggtctcgatctcctgacctcgtgatccgcctgtctcggcctcccaaagtgccgagattacaggcgtgagccaccgcacccggcccgtttccacctttttctattacaaacagtctgagtatgtcttttggatgcacttctgtatgcatttcttttatgtgtatacctaggattgaattagtgacttcataattgacaggcagttttccaaggtgtttgtaccagttgactctccagcagtattcgagagatcttgttttcccacatcttcaacctgtacttggcattgtcagacttttaaatgctttattttaaaatattattagtaaaacaacatagataagtttactgttgtctattacttacatgtacttgtaatgttaaagtctaggttttatggctgggggcggtggctcacgcctgtaattccagcactttggtaggccaaggtgggcggatcacttgaggtcgggagttcaagaccagcctgaccaacatggagaaaccctgtctctactaaaaatacaaaaacattagctgggcatggtggtgcatacctataatcccagctgcttgggaggctgagacaggagaatcgcttgaacccgggaggcggaggttgctgtaagccaaaatcgtgccgttgcactccagcctgggcaacaagagggaaactccatctcaagaaaaaaaaaaaagtctaggttttacttggggtgtgtgtgtgtgtgtgtgtgtgtgaatatttcagaggtacagagactctttctggtcatcgatatctacttgctaaattacgtcttcctacctaacaactgctacgctagagaccagaaaaaaaaatagtagagctttaaaaaaggagagagcatttttgtacctttttcacttgttgtgatattaaacctatgagtgatagctcaatttatcaattgctacatgccaggcgctgtgctaatgaactcttaagacatgtaaactcatttaatctttacaacagttttttatttccccattttttaacagatgaagaaactgaggcattaaatggttaagtaacttgctgaagattgtaagctagtaaatcatagagccagagctgaagctcaacagttgagcttcactggttccatctgggttctgaacacttaatatctagacctcctaccccgttggtgagttctggttagtgacattagtcctccagagccaccatgttttgtctccgggtggctgtatttgagcttgacatgttgtttctggtgctaacagttaggaaagcagggttgcttgaacttcaagacagagacttacttcctttcacttgttgtagaagttgaaagaagctgaagcagcatgagaatcctggctctggggctggtacagctattacaggaagggacaggacttggccctctcttctcctctctagattttcctgggggtactcagccttcatcttctgccacttagggtttgagtggaaatggccgagaatatgtggtaggaagcagtaaagtggacgtttcaatttccttaattgtccaaaaatgtggaatatgttatcctttagaaaccatgttgtaaatggcagcaacattcccaggccagctcaaaaaacctataatgtggccaaaatatatgcttacagctgtattgtttcctagttttttgttttcattgcaattgtgtagcattttatttgtcttatgagctactgggctagctgagaacttagccacattgtttatgtcggaaaatgcattccaaacagctaagaccacgtatttatcttagtgtagagctaactatccatagcttagatcattgactacctgaacactctgctccaagtaaactgaacaataccatcaccaattttttgacggtaaagagaaaaacatctcagtaagatagagaaacattttctatggatttactgtgaccgagaccaaattttaattagctaggatattttttaaattgtagcattatataaatgcatctgtttttcatttgttacatatgggtttttatttacccaccctcctaaaacattgaaatatattcatgtagctacctgaaccacttgtagatcttcagacttgtgcggcaaaaggaatgataattataatctgcttcaggctacaggctagaataattcaaaaggaaatgtgcattactaatgcagcagagctcataaattctcaatgtcagtttgccatttatgcagtcagtctggttggccagaggcaaaaagactagggttacataatatttatgaggtctgaagttagccatcaccaaagccaaatattgccagtgtttcagattactcattaaagtcagcatcatctagtcacgccaatggagttgggagcagggtggatttggtagtgatgaaacattagttataagtataaattctgtccattttagtccactactacctcctttacaggatttatagccttcctattttatatattatccctgagatgcctacctaaggagggttcccataccattctgcaaaaatctacttgccacctaaggtttcataacacaaaagtgggaatgggactttctttgctctgcattgtttctccaaccctcttcatgtttaactcctgagaagacctcctgcctctctgtacatcatcacaatggccaagtctcaaaaacttttagatcccagctagcaccttatgtcatactgtgctcagaaataattaagtgtccagacccatactcttgtgctctagtgcacttcaggagtttgacttgtatagggtaatgagcagctacaactccaggcctcagggttactcccaggaaacactgtggctgtgaactccaaattaaaaatgtgtgtacaattgtacagtttccaacatcaagaagcactagtccctggggctgttcataacggctttctttgtattttcacaaaagaacagtcccagaattaaaataaccctttcatttcctacacttcacttcttagaagtcgtcaggaaagatgagttttggtatgattgttgatggtgagttttttgtggggtgggggtgatggagcaaatacctttaaaactttttttttttttttttgagatgaactctcgctctatcgcccaggctggagtgcaggggctccatctcagctcactgcaacctccgcctcccgggttctaaagcaattctcctgcctcagcctcctgagtagctgggattacaggcacccaccaccagtaattagtcccagctaatttttgtatttttagtagaggcgggatttcgccatgttggccaggctggtctcgaactcctgacctcgtgatctgcccaccttggcctctcagagtgctgggattacaggcgtgagccactgcacccagccaaaacttttttttgttttattttgttttgagacagagtctcgccctgtcgcccaggctggagtgcaactgcctgccgggttcaagcgattcttctgcctcagcctcctgagtagctgggattacaggcgctcgccatcacgcccggctaatttttgtattttcagtagagacggggtttcaccatgttggccaggctggtctcgaactcctgacctcgtgatccacccacctcagcctcccaaagtgctgggattacaggcgtgagccactgcgcccggccgaaaactttttattagtgagaaaagttttaaggatttcagttaaaccaggattatagcttaactttaaggatttcattttacccctttctctacttttacctatatttaaaaatattaaaaagtccgtttttttctgtcaactatatggcatagtgattttcttccagactagtaggtggagtcggaagtagtattctgaaacatgtggaggaaactacatcaggagagcatttgccccaagggagcaatagtgagaggattccccacactctcttcgaaaattttaagacatactgctactcccagggggagatcaaactaaatacacagcgttttaggaactagagatatacagagtccttgttcagcggagtggcagatttgttttaagtttatttttgttcaaagtttttgatctcttttactgttacaagactaggggaaatatcgtaatcgattgtgctatttgctttgatacattcaggccctcttttttttttttttttttttgagatggagtctcactctctctcccaggttagagtgcagtggcacaacctcggctcactgcagcctctgcctcccgggttcaagcaattttcctgcctcagcctcctgagtagctgggattacaggcgcacaccaccacgcgcggctaacttgtgtatttttagtagagacgcccggctaacttgtgtatttttagtttcaccatgatggccaggatggtctcaatctcttgaccttgtgatccgcccgcctcggcctcccaaagtgctgggattacaggcgtgagccaccacacctggcccattcaggccctcttgtacctgatagccacagtatacaagaactgaaggagtctgaggccccccaaaagcatattatataaagcaaaaacaaacaaacaaaaaacccacttaaggctggatgcggtggctcattcctgtaatcgcagcacttggggaggacgaggtgggtggaccatgaggtcaggagttcaagaccagcctggccaatatggtgaatccctgtctctactaaaaatacaaaaattagctgggcgtggtggtgtgcacctatagtcccagctacgtgggaggctgaggcataagaatcgcttgaatccaggaggcggaggtttcagtgagcacgatatcgtgccactgcactccagcctgggtgacagcgcaagactctgtatcaaaaaaaaaaaaaagaatccacttaaatgctcatcattggttaaataaggtgttgtgtgacctgtccgtaaaggaattcatgaaacaactaaaaaagatcatgtagatctatattgttttgttagagacaggacccctaacactgaagactggttgcccccaactcaagccagatacataattcaaaaccaaacaaaactaagctttaaataagtaaatacagaataagaatataaaaacgttttaatttccttactctaattattttatatatatatatatatatatatatatatatatatatatatatatatatttcatcccccaaaagaaatgacctaatatatatatagttttttttttttttaagatggcgtcttactctgtttcccaggctggagtgcagtgatgccatgtcaactcactgcaacctccgcctcccatattcaagcaattctcctgcctcagcctccccagtagctgggattacaggtgcccaccactatgcccagctaatttttgtatttttagtagagatggggtttcaccatgttagccaggcttgtcttgaactcctgcccacaagtgatctacctgcctcggccttccaaagtgctgggattacaggcataagccactgtgcctggccagaaatatatattttttcactttaaaaaatatatgtatatatacatatgtatgtgtatatatgtacatatatacatatgtatgtgtacatgtgtacatatatacatatgtatgtgtacatgtgtacatatacatatgtatgtgtacacgtgtacacgtgtacatatatacatatgtatgtgtacacgtgtacacgtgtacatatatacatatgtatgtgtacacgtgtacacgtgtacatatatacatatgtatgtgtacacgtgtacacgtgtacatatatacatatgtatgtgtacacgtgtacacgtgtacatatatacatatgtatgtgtacacgtgtacacgtgtacatatatacatatgtatgtgtacacgtgtacatgtgtacgtatacatatatgtgtgtgtacatgtgtacatatatacatatgtgtgtatgtgtacatgtgtacacatatacatgtgtgcgtatgtgtacacatatacatgtgtgcgtatgtgtacacatatacatgtgtgcgtatgtacacatatacatgtgtgtgtatatgtacacatatacatgtgtgtgtatatgtacatatatgtgtatatgtgtaaatatatacatatatgtgtatgtgtacatatgtatacatatatgcgtacatgtgtatacacgtatgcgtacctgtgtatatatatgcatgcatgtgcatgcatatgtgtgcgtgtgtacacatatatgtgtacgtgtacacatatatgtgtatatgtgtacacgtgtacacatatatgtgtatatatatacgtgtgtgtgtacatatatttacatatatatatatttttttttttaggatacaggatctcactttgttccccaggctggtctcaaactcctgagctcaagcaatcttcccatctcagcctcccaagtagctgggattataggcacccagctatgagaaatattttaaatatcagatccttacaaaaaaaatagtattcttttattggaacttcacttggtttgcacttccaacacctgttagtttatccagtcaggcactccatatttggaaggaaggaggataatatttggggagaggaaaggtaagagaggggtgagttggcagtgatggaaagcaaagtcaaccccacttggtcacgactcactaacctccaatggagaaagtgtgtgagtctgcatgtatgtttgatttttgatacatgaaagaacataaaaatatgacattagactattatacttcaatttttaaaacttaagttttttaaagaaaagtacgtttaatgttttacaaaaattattgtatttatatttaatagcattatattccattataaaaatttcatttattgtagcaaccaaggagttaaaaaaaaccaaggatagacaaataacaagaaatgtacaaggcctgtatggagaaaacattagatctccagtgatggacatttaagaacactggaggaaatgtgaaggcatttcttatcttaaagaagacgttaaatattttagagtcaactggacatggtggctcacgcctgtaattccagcactgtgggagaccaaggcaggaggatcacttgaatccaggagtttgagactagcctgggcaacatagtgagaccctgtctctgcaaaataaaaaaaaatattgggcatggtggcatgtgcctgtagtcccagctacttgggaggctgaggcaggaggattgcttgagcccaggaagttaaaactgcagtgggctatgattgcaccactgcacttcgtctgggtgacagagcaagaccctgtccccccaaaaaattatagtcatattgtccttagattaatccataaattcaatgtaaacccaattttgtggccaaaaacactttaaatatggtggaaatacaaaaagcaagctgaaaagatagttgaaacaatgtagtacacacatttaatatttgtaattcacagaatactcttaaaaataagtcaggtgggctgggcacggtggctcacacctgtaatctcagcactttgggaggccgaggcaggtggatcacgaggtcatgagatcaagaccatcctggcaaacatggtgaaaccctgtctctcttaaaaatacaaaaaaaaaaaaaaaaaacccaaaacaaacaaaaaacctagctgggcgtggtggcatgcacctgtaatcccagctacttaggaggctgaggcaggagaatcgcttgaacctgggaggcagaggtggcagtgagccgagatcgtgccactgcactccagcttggtgatagagcgagactctgtctaaaaaataaaaataaaataagtcaggtgaaaaggctgggcgtggtggctcacgcctataatcccagcaatttgggaagccgaggagggtggatcacttgaagtcaggagttcgagaccagcctggtcaacatggcgaaaccccatttctacttaaaatacaaaattagctggtcgtggtggcacatgcctgtaatcccagttacttgggaagctgaggcaggagaattcttgaacctggatgatggaggtcatgccactgcactccagcctgggtgacagaacgagactttatctcaaaaaaaataaataaataaataaatcaggtgaaaaacaacccaagagacctaataggagacttcacaaaagaggatacagaaataaacaaaggaaaatatctttaacctcaggagtatctgaagaaaaataagtaaaagtgagatacagtttttcatttatcagactaacagattttaacattaaactgttggtaaaggtataggaaataggcatcattaggaagacaagttgcagtgtttgtgaacagttttgcaaatatgttaaagtttgcatatttcttaacccacaaatactacttttacacatttaaactaaaaagaagtcatcacttgtgcaactgtacttgtaaaaaacacattatataaagcaaaaaaatcaaaccaaaacaaaaaggacctaccaaaatgctcatcattgtttaaataaggtactatgtgatcccttcgtataagggaatgctccaaaaccactaaaaaggatcctatataagccgggcgcggtggctcacccctgtaatcccagcactttgagaggccgaggcgggcagatcacttgaggttgggagttcaagaccagcctgaccaacatggagaaaccccgtctctactaaaaaatataaaattagccgggcgtggtggcgcacgcctctaatcccagctactcggtaggctgaggcaggagaatcacttgagcctgggaggtggaggttgcggtgagccgagattgtgccattgcactccagcctgggcaacaagagtgaaactccgtctcaggaaaaaaaaaaaaaaaaaaaggatcattcatatatatgtgtgtgtgtgtgtgtgtgtgtgtgtgtgtgtatatatatgtgtatatatgtatatatgtgtgtatatatgtatatatgtgtatgtatatgtatatatgtgtgtgtgtgtgtgtgtgtgtatatatatatatatatatatatatatatatatatatatatatatgacggaattctttagtggtgatttgtgagattttggtgcacctatgctgctgtgtatttttatacatacgataagcctgaccctactcttggggctcagcctcatttagagctgggcttcccaaattttattttttttttctggaatcaaaaaagtttcaaagattgccatgtaatgctttttattttttttaattacactttggtatctcagaaatctctttctgtgagtgtttacttcgattctgaaaatagagctagggtcttgaagtggtttctgaataaatgatgaaacatatgttcaaagtctgtaactcttccttctccttaaccacatcctagataatccactgatggaaagtgtcatttgtgtgaatagattctctagttttagttttcaaggactttttttttcattttagctgtctggatgattaatgtgactaggaaaatactgttgacccatttaaatcatgtcagacaacatccattgctcatctacataatgaaatacacactgaacattacagcttaagtgtgggaggcagtgaactacaaaataatgttttagtcatttagattatgaaataaaatataagatattaggactaactatagcattaaatattaaactcttcaaatggtaattgtcagtaaaaacaacttttaaaccaaaacaactagtagcatttctgctttagtagttaattagaggaagtggaggtggttgcatgcaacagtattaatttaagaaaagtctttatgtgaaagtgtctgttaatattacttgactattatgggacttactgtaaatagttgagtttttcagttaatcagtggttgtgaaataatagttttctgacaaaattagaaaaatttgtttgacatttttatcatagtttcattaaacggtctccgcataattttaaagataactaatttatagctgaaactatttcaatcaatgatctaataacaaagataagctttgacagctttaaaaatatttaaattttgtaaggacatcatttgcacagtgattaaataaatgcaaaatttaaaggtactgaatttaggctatcaggtttccatggttacacctttccaagttattttgtgtattgtgtaaataggtctgtgagtcactggtaattatttgtttttttgtttgttctgttggtaattctgtgtttagctgaatttaatacagttcacacggcgtgctttggtttatgtatattttagtgtttgtgattgacagtgattgagcatttcttatggagtgcttgccttttttgtcataagtgatgtatgttggtagtgcttgaaatgtaaataagttcttcctgtatcactgtttaataaacaggaatttttatgcaaagaagacttcttgatacatttaaacaataaggtttgttgagctctgaaatatttctgctaaacagattgtgcaccaagacaaataggtttaaattcttacaaactgaggttaccaagggcaacgttaaagtttatggctaagcacagcattgactgaatggtatttagtaacagaataaaaaaggctgaattcttttttttttttgagacagggtctcactttgttgcccaggctggaatgcagtggtgcaatctccactcactacagcctcagcctcctgggctcaagtcatcctcccacctcagtcttctgagtagctgggactacaggagcatgccaccacgcctggctaatttttgtatttttcatagagatgcggtttcaccatgttgccccaggctggccttgaactcctgagctcaaaggatccgcacacctcggcctcccaaagtgctcagattataggcgtgagccactgcgctcagccaaaatagcagcattctgatctaactcttaaaattgtttgtgatagtacactttacagggaatgtcttcaatgcaaagtagaatcttcctataacataatttctcccatcccaccctttgcacaaatttaagaagtattcttatatgtttagaaagatatgattcttgaaaaaagccagggccttttatggatgtaggaaggaattttccttagacctcaccattaaccatcagcatactagcaagggcccagcaggaactctcaggaaaacatcaaaattaggctgtccgtaattcatcctactgagtgtgagccttctctcatacactacaatcatgaaatgctgtccagtttgtaaagtgtttctacatctgcagtctcatttggggttcaggttggccctgtgatggagtgaggagaggcccagtgctttggatggtgtcacttttaagtagcagctctgggacccaacctaggatctcatgattactttgtgaattacttgctttgtggattatccaaggcacattttaaaattcaggctggtttctacctactgattagtccattttagagtgacctcctcccacagtcaggtaaccaatgatagtaattaccatttattgagtgcttaccttatgccactttcgatatatcatgtcatacaattatcatagcaaccctgtgaggaaggtattattatccacattaacaaatgaagaaactaaggcttaaagaatttaactaacttgtttaagtaaaccaatagtactcagagaaggaaaaccaatttaaacaagagctcaagtgaatataaataggaaggcatatcttttggaggaaattctcatggtgcattcacaagcaaaatataaaattttaaatttcacactgtttccttcttttttacccccaaattgactataccttattaggcattgaagagttgaggtttctttgtaacactccagtagaagcatacttcaaaaagtgtcccatcccctcagacaataaatatgtttcaaatgttttacacatcaaatattttggtattgtggcaatattaaaaactttaaatatgagatgatgaatttgtcattttactgtgtgaataatcttggtgttggctaaggttttcaagtaatgtgttttcagatatgagaagcaagcagcctgctatatacagataaagagtacatgtttttttggtggttggggtggttttaatttttaacgtttttaaatttttattttattttaacttttttaaggcagggtttcgctctgttgcctaggctgaagtgcagcagcgcaatcttggctcactgcaacctctgcctcctgggctcaaacggtcttcccaccccaacctcccaagtagctgggactacagttgtgtgccaccatgcctggctaatgtttgtattttttgtagaaacaaggtttcaccatgtttcccaggctggtctcaaattcctggactcaagcgattcacaggccttagtctcccaaagtgctgggtttataggcgtcagcctggcttaatttttaatctttagtacaaaaagtaacagatagttgaacattcatatccttaaatatataagtatatatatttaaataaatgtttatttatatttatgtttacttatatacatatatttacttatatacatatttatatttatgtttacttatatacatatacacacacatacacatatatatgggccaaattgtaagcaggcatctatggagctccccttttaagcctgtgccattttaacactttgtactttttgaattaataccaaaaactgtcgagtgagtattcatatggtcaaccaggtatacctagtagaattgagtgtaaaattatttgggcaacataactataccagtccaaaaagctgccttcagaaaatttggagcttttgcttttactaaagaggttactgtatactttctctttatttttctggttgaaaataactccttgatgagtgatcttggcttctgttgtcttgaatctgtgtactctcaactgcagaagcttggaaatatattgttttcctgaagcattagctttctcattttaggtagtaattattgacctatctacctaccgatttaccactcctattgactggttacagggcagagacaaaactcctacagttgtcaaaataccacgataagattgatattcaaatgttttctttctatcccatgcctttcacttagagatgtacagtgaaaatcttctcaggaagtttaagatgtagggttttttgttttttgtcttatttgtttttgatattgatactacaattttggtcaaagctctgagctatttcatcccaatggtttgcttgtgtggcaataactttcaatggcccattgaaaagaaaaaaggaaagaaagacatccagcaatatacctagggcatgctgtatctagaattcagttgacactattgtaatatgaagactaaaatcatgctcttttcaaatgctttaatgtaatttaaaaatatattaaagctgtgcttttgatcatagattataagccctcatatcttctgttattgggcattttaatacaaaataactaatattttaagtagtatatgacagtagtatttatgaatagtctggaggtttttttaagaattaaagaaggattttgttactatatcagtttttttttaaaaaactcatgatgtttttatatagactttctctaaaattcagttccatgtgtgattcctatgaaattgctctttctggttctgatttgtgtgctttaatataaaatcattctattttcctcttctttaaccaaagtgtgtgaggtaacaggaatgtttcttttgagagactttggaaggttgaaatttgccagatgttctgtgctaacctagaagtgtgcattccctgggtagcaggactgtgtgaaattctttcctataactttgacagagcatttggttttggttcattttagtgttgtgcttctactctgatgagagcttgtcttttattctgtgtttaaatgatattaaggcatccagaaaatctgacaaagaaaatgatattttgatgacatttttcacagggctcaactagaatgaattattacattttaaccacggccctaataaacagcttctttatttcctctgtaaggatacaatatttctttgtccaagaagttgcctgagtatatgtattgttgaagtgctaaaaagctgcttttctctaaactttagctgagagacaatgggatttgccaagtatataccatttcattgtgactcaatactttataaagatgaatttaaattttgaagtaaactttttttgtctcaaatggagaaattccatgcaatagccctattgtacaaattaaacatttctatgtaacttctacttatccaccaaatgatcagcttttagttttatacttgagttctgactataatctttggcacccttcccccagctataattcggctagcctaaaggaattttttttcctagactcacaagcaggagcctatattattaagtaggaatgtttatagatctgtgtttctagagtaggttgaggtgttttagtttcccaaaaagaggggaatgcttcttgttttaaatacagatgcctgtgtgctggtggtgtacattagtgaataatcacatattaacagatttagcttttgtaaagaagcaaaatgaagtgttttcgtaaaacatttctgaacttgtcattgatgttatactctatcagttgctattgataattttatttaaaggaggaggtatatagtatagcgccaacttcctgattaggccttggggaaggtcacgttttgcagtgacctgggcaccactcttaaatgttgttattattggaagagggtaccctcaggctgctgcccttcctctccccagaagcgctctgtgactgactttccagttcatcttttctagaaccaagactcccaggctgtagatgaattctgacatctacagaccagtatccatctcaacttcatttgaggtgaattttattagtagtagtgacccagtcctaccttaatatgagaatgatgcatcctcataaaaattgcaaacttagagcagtaaacaactaggataaacttttatgtttcagcataaaagtgagttatgacttttttgtcatttaaaatattgcacacatttcctttttatttctgtgggatctttgttactgttttagtggtcttaagtaaaaataacttcaaggacaacacggttggatgtgaagtagaatatttatttcagacaagtattatgcccacatattttagattcaactatgtgctttattttcagcattaaagaaaatgagctgttttccaacacctgcataccaactgggcctgcatcctctttagaaatgttgtttaataaacactgtggctttatcatccagaggctgttgccaaatgctgttaattaggccaaaaaaatgttttttaaaggttggtgaaacagatccacttttctctctgtaatggcatcttagcttgaaatccaggaagcagtggtgtatggtgtccatatccacgatttcctgcattggagaaaaagtgtggaaagcatctggggaaaaggaggctctttaccagcttgtttcctgtaagttcaattggaagaccttgtctgtgcaaatagatttcaaaatagagcctgccctttgactgtctccataattacatggctcgctctgtattttatttggcagccagagcagttaacccctggaaggaaggggctgatggtatggccagcttggcttcccaggcatgtccatgggaatgaataaaccactgtttggagaagcccatagctaaaaacacactagaatagtctgtaactgaactgaaactcttttaaaacaagttcactaatgtttattatgatcggttaaaaaacttaactttgtccttattgtgtagattatagagctgtattaattgttttaaaaattgggaattgggggagttccttgttgctttgatgtaatcaacatctgtcaacagatgaatttgcttttgtttagtttcaagggctcttgtcctttagctttgcccaatcagtatctgcttcagcctggggcattccctagtagtgcatgtggttttttttccctcagcaaatgcataggttatttctcatgaaatgtgagcttctcttctgctttatagttgccttgagatgggaaggaaccttcaatctttctcatttattttgaaacgtacaccttagtactagattataaaaatcaataaaagagttatatcaagtgatgcagactatttaatttttctttagcaacatttgtacaagttatgaaacatgtcaagcaatcagtgttttaggtcaagaaatataaggcatggatgcatttgcagtgttctcatggacttgaagcacacagcgctgtaagagcctgtgctcctactctgagtaattggttggagttcatgaagtgtgatctttctgtgggtctaaatcagcaccccgaaaatatattcctatgctatagtcccttctgagcttactgtaggaggcaacatttttaaacagttaaaaatgtatcagattgctgtcacaaagtaagttgggttttttttcttgttaaagttaatatattattaagcaaatcatttggtttaaaattaaaatcatcaatgaatgtaagaaccatatttgaaaatgaattagcaaaacattgttgtttttctctcttggtaatcataaatcatttaaatctggcaggcattcctctcttcatccaaaataattgcctccatttgtaaaatcaattagatgttaacatgctataaataatagttttgttactagactttggcatttactgatcattatgaaaaaatatattcagtaagacattttacagggtgtcttttaaatcacatattatctctggttgacattgttagctaatgtaaagtagtgccaagctacattattgtgttgttttctacccagatatttgatacctctgcagtgtaacgtaactgaggattgatggcacactgcagggtgaaagtgcttccctggaaacatacaatgaaaaatatatgtgttggtagtccaaacttgagtacaaatgtactttgttcagttttacaactgcttaaaataataagcattttaaatgtctctttgaaagttcattcagacctctcccttaaaaatacttattgaccaaaagaaaactcacattttcagggataaaatcagcttaattaagggtcattagtaaaggtgcacatgaaaacccagggctcagtgggtgaaatggaagcatttcattatgtggtataggatgcatgagcagataacaattaaaatggaccctgagtaagaggccaataaatatagggcatgttgtgtgcagcaacattcgttatttaaaatgcattcctcctggccaggcacggtggctcatgcctgtaatcccagcactttgggaggccgaggtgggcggatcacgaggtcaggagatcgagaccatcctggccaacatggtgaaacccgtctctattaaaaatacaaaaattagctggacgtggtggtgggtgcctgtaatcccagctactcgggaggctgaggcaggaaaatgacttgaacccgggaggcagaggttgcagtgagccgagatcgtgctactgcactctagcctggtgacagagcaagaagactctgtctcaaaataaataaataaataaataaataaaatgcattcctccctccatcatacttgaattctataatcctaccttcagatttaacctataaaggaaaataaaatgcagcttttagaaatggatgttattactgaatatgaaaatatttaaaaccataacctagatttacattccaaatacaaattttaaatatgaaaaaatgtgctgcaggatccagaggacatagagcaatttcaagagatgttcagactgcacagtgtgctcttccatggagtgcaggaagaagttgcctataattttcagcgttcaactcagactaggtgctgatagaatttttgtaacactaaaaataattcttattattacctttgataacagtaactattctagtattcataaaaaataacatgtagatttactccctaagaaaaccctatatagagttgctgttaggtcatcaacagtagcaatactacgatcatctcttgcaagatcaaattagtataaagcaactcctcactgttctgggctctcctactcccctgaggtttctggtgatttcccactggtgtctctaaaaacatcagattagtccacttgccccttgtagtaattagtacacacctgagtcttgtttccccaaatagctttaccaaaacaccgtgtgcagtgaatcctgaatgaatgatagtgtgtgggagacggagggactatttctgtctctgaagatggtcatcatgcatcaaatttgttgtaacattggtggtagcaatttggaaattagatgtagttataaggtatcagcagtgcttttgtcaagaaatgaattatataggaaattcaagagaccatttctacattgatctacattagttactgtagttcgggtatcctttctgtgaccctgaatataatagagactggggattttaattttgctcactctgcatttagaaaatttactacttatttgtattgtgataaacaaagttgagggcccgcccctctttctttgccaggctagttggaggaccattatcttctaaaggtaccatgacttatgcccatttcttcatttcccctgtgaaaacaccagattttatttctaataaaaagatggaatcatttgtaatgagtagttagtggaataaacacagtatggcaccttattatcctgttgccttgtgacaacatttgtaagggtgtctttcatcagattgaaagaaaagaattcgtttcaaatacaaaagtgtcttatgaaagtgaaattgctgaatacagtgtagaaccataattgtcaacagattggatatgttcaggctgtgttcctgacgtttcgaattttaccatccagtcatgtgtgggtgtgtctgcatcttttcggcagtgaggctgtcatttggcaggacaggtaccttggcaacactgttcatcctaaaagtgaatgtctcaaaagcctcatccagatatctagtggaggcctgatgacttcatgcttcaagtttaagtacatagaaaagattccccctataatgactgtgtacttgaacttgataacactgataaagatgatcttttgtgtaatcaaccacattgaaaaaaatcttcatgagtcctaaaattgatcagaggctacatcttcccatttcctgggatgtagcatgacaatcagatggtgctgaatgaaggcacacatttcagagctgaagggacctcaaagattgtgaagcccaactctcattttactgagcttctgcatctcacagggtaatgtctttgaagtactcagcaccgagcttggcaccagtaagctcttggtcagtcagcatccactgttattgttattgctcaagatcacatagctcttagcaggaccaggggtagaactttctgtccaatgctgtgccactttggttattttttcatcatgcatagcactgtctgatgtaatcaaatgcatttgttgatttgcctatgtctgcctcccactacaaggatgtaagctccctgggagtcgggaccttgtcacctcattcaccactgaattctctaatccagagcatggcacatgcaatgagttcattaagtagttgttgaatgaatgaaggcatttagagaccccacaggtaaacatgttgaagaatggagaaggaaaaggaaaagaaaggagcatttatggagcacctattttttaaaagatggtttacctatttatgttatctcagcaaatgctcacatcagctcgtggtagggagagcactactactcccatttaatagtgaagaaaatgagtctcagaagttttggtaactcacacctgtttgacctccaagctcatgctgttgtcactaccatagtgcctcccaactggatcatttctaagaattttcatgaaaagtgtcttcattctaaatgctaactagttacatgatatttacatttttcatgataaaaaaaactgaccttgaaatctagtccctgaaagaatacattatgtaacaaaacacactagcgaatagaactcatagagcccctgcacactgctgagaggcaactggaatggcagacacagccctggatttggatttacaggattaagcttggggcctggtcattgattaccagacttgtgagccttagttcctcatctataaagcagtgatgttaacagctacctgcctaatgacagagctggtaagaggtaatgtatgtagagcacctagcactgagcttaatctaagtgtccattaaattttaaccactgttattattactatttatattagcattatcattattaatagtaattataatactttcctcagaagagaaacacttgtgagtttgtgtcttgtatgtggtcctgcctagcaatgcaattagggaggtggaatcatagattgagtccacctgtgtctttccaaattttccatttcatatccacagactgtccaactaatagttctggcagccacctccccaaagcgtgtgtttggtcagcgaaggcagcttggcttaaggtagtgggtggattaggccaacccatcaccacttttggaaaaataatagtagtagtaacaatagttttgtgatgccttttcaattttctgggtatttccctgtgttttagctcctgttttttctcatgcctgtgagagaagtaatacattttgtagaggcaacttagcctgctttccctctcagctttggcacttactgcatgttcctttgtgtgcctcagtatcttcaactgtgacatggagtaataacagttcacaattcatacagtttctgtgaagattaatgagctaacatatgtaaagtgcctagtacagtaattgaggcataataagtgttcagtattagaagctatactggaggtcatgttttctttcccattttattttttgtgcagactttttttttttttttgagacaggatcttactctgttgcccaggctggagtgcagtggtgtgatcatagctcagtgcataactcagtgatcatagctccagggctcaagtgattctcctgcctcagcctcctgagtagctggactcctgagtagctggactgactcctgagtagctgaactcctgagtagctggactacagtagctgatggcccaagccaccacatctggctaattcttttattttttgtagagatgggatctcacgatcctcccacctcgacctcccaaagcgctgggattacaggtttttatgtattcttgaaagaactattatttattgggtatcttctaaatgcaagacactttcacatttcttatttcaattctcacctgagactgaaatgaagaaacttgtgcagggccacacagctaataagtggtagagctgaaacaaaagtccaggcttctgccttccaactgtctgcttttcctaggacactaccctgtccctcatatatcagttgacaatactagggttggtgatattgtcattagggaaatattatactttaaaagctttacacaatacatacctgcctctatcaagcaacttttttttttttagagagacaggagtcttgctttgttgcccaagctggtctcagactcctgggtttaagcaatcccacatcagctgccctccaaagtagctgggactacatgtatgtgccactgtacctgagttttgtaacttctttttaaagaaatgatattactgacattttgtctagtgcttgaaattgtttaaaatagtaccaaaaacacctctataagttagattcaacaatattgcagtccactttaaggagggacataattgagtgaaacctatcaccctgaatcactgatcattgcggtttgtttgcatcagtgcctttccccaagtcaattagagatccagagttttgaagccagtacttacctgcaattcacgttttcattatgtttcacagctgaaatgttactctaggccagttctcaagcttcgtgtgcgtcaggattacctgagggctggttaaggcacagattgcccgcctccatcaccagtttctatgtttgtaggtcgatacggggcccaagaatttgcatcttttttctttttctttctttctttctttttttttttttctgagacagagtcttgctctgtcacccaggctggagtgcagtggcgcgatcttggctcactgcaccctctgccttccgggttcgagtagttctcctgccttagcctcccgagtagctgggattacaggcgcgcgccaccatgcccggctaatttttgtatttttagtagagacaaggtgtgggattacaggcgtgacccaccgcactcagccttgcatcttttttctatgtgacattatactgctggtctgtgaacctcattttaaggactactgctctagaccaggattcagcaaatgtctcctgtagagggccaaagagtacattttttaggctctgtggaacatgtgttcacaactactcagctaccactgtagctcaaaatcctccatagacatttgtaagcaaatgagggtagctatggtccaatgaaccttttatttatgggcaccaagatttgaatttcatgtattacaaaatattgggttaaaaagtttttttcaaccatttataaatgtaaaaaccatttttaggttttgtgctgtataaaaacagtcagcagtccagatttggcccttgagctgtagttttctgacccctgccatgtagttgtgacctgttggggacttctaaaactattgttctggccaggcgcggtggctacgcccgtaatcccagcactttgggagaccaaggcgggcagattacgaggtcaggagattgagaccagcatggccaacatggtgaaaccccgtctctactaaaaatacaaaaaaattagccgggcctggtggtgcgcgcctgcagtcccagctactctggaggctgaggcaggagaattgcttggacctgggaggcggaggttgcagtgagccaagatcgcgccactgtactccagcctgggcgactgagtgagactccgtctcaaaaaaaagaaaccaaaaaacaaaaaacaaaaaaaagattgttctaaatatgaaagtaataaaatgaatcaaaatgtcttcctggctggatgcagtagctcacgcctgtaacctcaacactttgggaggccgaggtgggaggatcgcttgagcccaggagtttaaaaccagcctgggccacatagcaggaccccatctctacaaaaaatacaaaaattagccaggcatggtagcatgtgcctgtggttccagctactcaagaggctgaagtgggaggattccttgagcctgggaatccaaggctgcagtgaaccatgatcgcaccactgttgccttagcctgggcgacagagcaagaccctgtctcaaaaaaaaaaaaaaaaaaaaagtcttcctctctacctctagccccaaccacaagccacagaaagagccactgtttacaaatatcaatttccagaaattttatgagcacgtgcaagcttatataaatgtataagctccttttacattaatgggctttttatatgtatttgttaagcattcacttttttcctaacagtgtattgtgacctctttccatatcaacacatagagatgatgatttagcctattctttttaatagctccagaattttctgtaagtataccataatatatttaatcagtcccctactggtatttcctatttggaaacatttgagttgtttcccactttcttctaccacaaataatgctgccatgagggtacatcttcattcatccatcagtgcatagtgtctgcaggataaagtcctaggagatgaactgctgagtcaaaggatatgtgcatttaaaattttgatagacatttctaaattcctgttgtgagtacttcaaaccctatattcattttctttcagtgttatacttacatttttgctatttagtctttatctgacttgaacattcatcacaatgaatttcagtataatgcctcactgcacgtgaacttaacacagagtagtaatcctatggagggcaaaaagtgcagctggcaatttgtccgtgattcttgaaaggaaacggctttacagagtataaagccatcaaaacagtgccctgaatctagggtcgtcttggacattgccacataaggtattacagcagaaattgttctttttacagacctggtgcttagcagatgtttctatatgtttgtttcccgttagagtagagttttccattgtcacgcatttatgtaaacatagtattagctaataaatacgctgtgttactattgtactagaattcagaataccactgttttcatttctatttggggcttttcctttttcagtcaataaggtattagaataatgatttaatagacaacaccacaacatcttaaagtggaggactgtgttaggttgtttttttacttaaaatatgtctgtttctgctcacaggttctcatagaattttctcttcaccactcaatcatatctacttacacaagcagtcaagcagtcaacaaagaagaaatttcttttttcggagacaaagagatatttcacacagtatagttttgccggctgcagtttcttcagctcatccggttcctaaggtactgtattgcctattatctcctgctttttccagccaagataaaagttgactgcagaagtgatcaaatatttttgcacctttgatttctgagccatttgggttttaattttcaaactaggtttgtgatctaaaactgtgatttgagaagttttaatatcctgcaattctatagcattaattttttaaaacaaagctctaagctttcaattgcttagagtatttagaattaaaatttttaacatgaaattttctatattaaatttctaacatgaagataaaactatacgtatgtagttttctaactgttttagagaaaaaaaattgactataaaattgtgatgattcaaaagagattacttaaaactaacatactagatttttttaagcctgttcttacattttccttgttattgatgctggtgtctttgaattgtcttttagactaaattaaataaaatatgtctcagagcagtcttggcttttttttttcagagattgcaattctgtggaaaggcaatctatccatttttcaaaatgcaatataaagggagtgtgcgagtgagccctttaggaagaaggagagtagctaaagaaatatagattggtcacaaaaatcatctgctttctcccttttatgaactttgtttacagcgagcccatatttagtatgttatacttctgaaggtgagtggcccacttttatggcaaaggccagtgacacagaagggccaccaggatgtatcccctggcctggccatcacagtgagagtgagaatttggtattagttacaaaactgacacttttttccttagaagaaaagaaaaagaaatctctggtgaggtgaattgtattgctttagccatttcagtcaatttcagcatgacagcccaacagcccttctgcctgcaagttataaccttgccagatcacagagcagagtggagacaagaacacaggctctttgggggagacctggtgagcatttgtgggcatttgtggtgtagctgtgggagagtagatgttcctctggagctcagctgtggcaaaccaggcagtagtgttacctgtatcagaaaacccatctgaacaggggagcaagtgaagacccgtaactcctgcaggacaggcttcacaaagaagagagccctaacctcagcccttccagagctgctgcaatgtttcaattgaagagtgttatctccctcagcttcctgtcccaaactgctgtggagcctaactgtggactgtccaataatgcttatagtttgtaatgcattataaactataaatagtttgtaaagagctgtgcaaaaccttgggactgaaagaagctttgtgtgtaagatggtatttatttcctgaatactgcccatggtggagaatggtctgcaaaagtgatcagggttgcacgtcttgagttttggggtggctttttgtttactcttgacaaataatggaaatgttctaggtaatttttatgtatttgaagaataaaacttgtttcattttattctagtgtctcagtgtaagtacggttgcaaaatgtaagaaaagtgtatatgtaataggctttagggaacttgatagtcagcctttttacatatgttcattttgagagggtgttgggagctatcttttgcataaattatatttttgtgttaagaagatgaaagtgctcttaattaaccatttggtgaattggaagcttggtgctatttttcatcaatggtgaatatgcttctaactgggttgggaggaggaaaaagagaaaactactgtttgttttgaccagaagtctacttcagtccagtttgactcaaagcatggtaaggttaacagaccatccagaggcagcactaacaggcaatgttaagttcaaaagggcaggggaaggaactgggggcagcctggagggtctgttgtgctggcttcggaggtcggtgctccggcaggaagggcagagctccatgaagcaggaggctgtgtctgaaaaaatgatcccattgtcgtgcgctgggttctgatcttcgttttcaatcctttttcctcaagcacataaagaagccagactatgtgacgacaggcattgtaccagactggggagacagcatagaagttaagaatgaagatcagattcaagggcttcatcaggcttgtcagctggcccgccacgtcctcctcttggctgggaagagtttaaaggtggcgtctcaccaagcctcagaacgacttacataaggggcaacaaacactcctctttttttccttctccttaactcttcttttaggttgacatctaatttgttttaaaaatttatttgttttaaattaatttgtttttaaaaattaagtaaagccttgggatggggaaaaggaattttattattttatgtgtttattcaagaagtaatttaaaatccaaattcaattttaactagcagaattctagagatactttggtctcagtcaacctatccaagttgatcaatggcagacagctttgatttttgcccccctactcctgcctgtagtttcagcttttactccccacattatttctgtgtgcttgaagatttgctctaccttgtcctttgtctcctattttcttgcatttgccctgcaaagaaagatcagatcacatacacaaagctgtaggtaatatagcagtgtaattacatacaacttcctactacaagatttagttcttttaggccaggcgcagtgactcatggctgtggatcatttgaggtcaggagttcgagaccagcctggccaacatggtgaaaccccacctctactaaaaatataaaaattagccaggcatggtggcgggcacctgtagtcccagctacttgggaggctgaggcaggagaatcacttgaacccaggaggtggaggttgcagtgagccaagatcatgctactgtactccagtctgggcaacagagtgagactccatctcaaaaaaaaaaaaaaaaagatttagttctttcatttagttctttcataataatctgaagcacccttctgtataaggattataaaagaaaaatatgagcctattttctgccaaaaggtgggcagaatttaggaagtgagactcaaagataaaatcactcacagtatcttctgtgtaataaacttacaacacggctaaacataatgtatatatacaaaatgaagaaaattattgaagaaatggttaatttttaataaaagattttatttttgttttagaattttatttatgtttatggagtttatggaaatagtcttcatatacttataaaactcaatttcagttttcttttagtttgggagcaatttagtttggaatacctttagtaaggaaaaaatattttaaaaattacatttatttagacatgaaagaaatgaagattacttaaaatcaaatctctacaaactatattagactcactcttttaaatatcaaccataatctctgtgccattgctgcaaaacccctgtaatgttttactgagataaaaagatgcgagttgacctacttttcaagcttttcaaggttcaactgatgaaccttttgagcatttattcacatgcgctgggtagcccagggcaccaatcattgagaaagagtaaggaattgccgaagaacataattttgaaatcctcaggccaaaagggagttatgtcatttaatgactcacaaatgatttagaggatcgtagggtttaacatttctatttcctaatggtccataacaccatcatatgcccaaatgattgtccacaaggcacagttgaggattctaacactaatcataattaattcaaatgttgtaccataactttatcatagtaaatttatacagtctcacatggaagtactgttgctatagcatagttgataaatacaagaaatgtcttcaattgttgctgcacaatttctttatttaacattttaggttgacatgacaactgaagagatagatgctcttgttcatcgggaaatcatcagtcataatgcctatccctcacctctaggctatggaggttttccaaaatctgtttgtacctctgtaaacaacgtgctctgtcatggtattcctgacaggtattcagttcttaataacatattgttcctttggaaactaaaacatgaagctaagatctgtaacatatgttgaaagacactatcattcaattgaaacccaccggtaaacttctgaaattgattatgataaaacagaaattttgaagtattttacttctaaatggatacaccaccaccatttaatgtttgttaaagcagtgcataatctaaatgggggttgtgcattacgtatgtcttttacttcttagattttaatcatataagtggtaaaattcaaatgtggcaaatttttcttatcaactcttgttttggttcttggcaaaattaaggtaataaattaagtgcatcttttgaaataaagattagatttagttatcctgtgtagtcctccttcactccaaattatcactgcatcccattgggtttgtgacagtagtcattaagtatttatttttattttccttttattgagatctgtctatcaccatttttttttctgtttacgttttagtcgacctcttcaggatggagatattatcaacattgatgtcacagtgagtaaatcatataaaaaattgtctttgatcaacttcagaattgctggtagcaacaggaagagtggattgaaaatgtgaactgcaccagtggaagtgctgtttacttctagacccagacgcaagcagctggtttccttttttgtctttaactctgtgtttattccaagtaaacccaggcctgacttgaatttagggctgcaatcagatgcactgagatcaatgttggcctaagtgaaatgtcaacccaatcctgctatgtgtcatgtttttgagaaggtgtaattgttattgatccactgtgtagttaacgcagagcaccacagcactgggcagctgctgaagctagatatgtatgagatgagctaacacgaagaaagccagcatttttccttcactctgccaagattgatcttcctcttcctgctgattttgagtggggcctgtcattatcttactctgtcattaggggctacattggcctgtgtatgtcagtctatttggacagcaactcttttgctagcagtgttccctagatttattaaaatccctgaaggtaacgttgagttccatttctggtatagagagccttgtgctcaaagtaagcagagtggtttttttgtctgaacttaagttttcaccaaatggttaatagcctttcttttaagtaacaagcctaagtaatttatcatagggacttcaaattgtacaagatgtagctttttctcattttcttagccttttaccattctcagacttggattatatgtgcttttacatttctgtttattaaagaattttgtaatgatacctttggattacctagattataaataaattctgtacatctaatgattaacaaatacattttaaataaataaacaaaatttaaacatcttaggagaactagttgaaatgacaatattcagggaatacaatttctattaataaggaagtgtttttaagaatagtatctagaccatgaaactgaagtaggagtgggaatgagataaaaataggaatccaatggtggaattcagtctgacttttagtttaagttaactaaaccttttttcttcatatcaatcatatgaggagatagccaacgattctttcattgctgatgctatttcctgtatcattttatcctacttaaaatgcttgaacacttgcaccacatacatcctgttggtatctttccaactcagaatcatgtggaaggaggtattttatgaagtatacctaaaacagagttcttttcatgagacacttttattttggattgtacctgattttacggttttacatctattttctcatctagtcaccctatcatgaaatgttaccattttaatgttttgaatgaaatcaactactcttccctactgtttccagtgtgtccaaagaaaatactctattccttttctaagtttcctgaatacttaataaacagttttgtatttaacattcaaattacttcacaattgcaaaacttataaagcaaagtgaaatatttccaagtgtctagaaatgtgaaggaatctaggaaacatataggtccatatcttaacaaattatatttcttataaaatattttattaagtgaaggactccattatcagatcctatgtttctatcagaaaatactcattgcatcttagaattattgacgtctagtatacatcacaagaaattagatttccttcccccctttaaaactgaaaaatgtttttcttaaagacaatgcgatgtccatagtagttgctcaataaatatttgttaaatgaagtacaagggccaggcgcagtggctcatgcctgaaatcccagcactttgggaggccaaggcaggcggatcacctgaggtcaggagttcaagaccagcctggccaacatggtgaaatcccatctctactaaaaatactaaaaatataaaaattagccctgtgtgggggcaggagcctctaatcccagctacttaggaggctgaggcagggagaattgcttgaacctgagaggcagaggttgcagtgagctgagatcgcgcccctgcactccagcctgggtgacagagcgagactctgtctcaaaaaataaataaataaataaatgaagtacaagtactagtttatgggtataaatagaaattgtagatgactgccacagactttcaaaagtattgtatttctgtatatagtgaatcttttaagtagtctttttttttttcagacggagtttccctctgttgcccaggctggagcacaatggcaggatctcagctcactgcaaactccgccttaagggttcaagtgattctcctgcctcagcctccccagtaactgagactacaggcacacgccaccacacccagctaatttttgtattttaagtagaggctgggtttaccatgttggccagactggtcttgaactcctgacctcaagtgatccgcccacctccgcctcccaaagtgctggaattatgggtgtgagccactgcaccagtctcaaatagtcattttgatattccttccttccttccttccttccttcgttcctcccttcctccctcccttcctcccttcctttctttttctttttctttgtttccttttctttttttactttttcagatatagggtcttgctctgtcactcaggatgcagtgcagtggtgccatcatggcttactgtaagcttgaactcctgggctcaagtgatccttctaccgtagcctcccaagtagctagaactacaggcgtgtgccaccacacctggttaattttttaattttgtagagatggggtttcactatgtttcccaagctggtcttaaactcctggtctcacgcaatcctctcatcccagcctcccaaaggattgcaggcgtgagctactgcacccagcctcaagtaatcattttcaaagctaggaaaaagtaatatgaaaagatgaataaagattttttaaaatagtacatttttacttaaaaagcagttatataaacattcatttatacattttcttgactacgcctatattagcaaattttatattcttgtattttgaatgaaatcgtattttgtattttgaaatagtattcttgtattttgaatgaaatataagaatataaaaatttgaatttttgaacgaaatcagcatagtcttccctactgtttccaatgtgtccaaagagaatactctattccttttctaagtttcctgaagacttttaatagtttcattattaacattcaaactatttcaaaattgtaaaacctatgaagcaaagtgaaatactgccaagtgtataaaataaaaactcatactttcctggattgcaaaggactgtaagtgggagtaaatgtataaaacactattctgttgcaaggtaattaagataatttgatatagtagagaaaacactcgattagaagccaataatccatcatattaacctgaatctacctctatattctgccaccaaccttaaacaagttacttatctgtgcctcagtttcctgaattataaactgaagatctaataaagacctttcttgcttccttcacagaatatgagagcattttttaagaaatgcagagtagtatacagatttaagacattaattcagtatcacaacagactgaaagctcatataaacatcttttttataacagtttctacattctaccttatgagcaagagaaatgtgaaaaataattagataggacaaatttatgcaaagtagcaaattccatgctacatcaaaggatcagtatccaaacagttgcctctgccttttatatttactatagtgcttggttatcaatgatttataatgaatctggtatctttcaagatcctacttggcttctgaatcactgaagactgataaaattatactttctgtaattgtgcttttaagcttgttttattatattctaattctttagatatccatatatagtgctttctgttaacgttcggctgtctggaacatttgattaagatttcacttctagacataggatttttctgtaacacatttcattcctatatggaaccacttcaattcttagaactgaattctcctatttgtttgttagaatacagacatgtctatcttacttcttcttgtcattatatatcacttcaaatgtagaactggtaaatacaaaatcaagtaagtcttcatgacattgaagaaacttttcactatgttaaatactttttggttctctaaacctgttgtggtaattgtagatcaaggtctttggctactaatttttgcttatataattttgtcttctcagaaataaagtgaggaatcaaaatattacagtagtattgttcatcataatgctgaaataaccatactagttaacatagttgtttttaaattttgcaatatcattgcatggcttcatcttttaaatttctgcaaggtttcaatatatctatttcttctttttttgataggcaaatgaataattctggaagggtaaaacatgagtctactaaatacataaatgaatacaatgtatactttaggaaagtagatttttaaacaaggacatatttttaaatttctgcttatgtttaggtctattacaatggctaccatggagacacctctgaaacatttttggtgggcaatgtggacgaatgtggtaaaaagttagtggaggttgccaggaggtgtagagatgaagcaattgcagcttgcagagcaggggctcccttctctgtaattggaaacacaatcaggtaagccttacattgacaagtaaagggagggttggcaaatggtacaaaggttattggtggcttggtataaagttgatgacatgttttatgattcagaaccatcatttcagtctgatatcagtatgtgaactgccaggctgcaatattgttccctgagttgaaaaaaaaaaaagattttataaaaatgaattataccagggtcagcaaagaaacttatagaaggagcaagcaatatttacatggctgcttttgttttagcttgacatactggtctatagtttccctttattcaaaatcacaccaaatatggaagggagtacctaagaaggggatgagcatctcaaccctggggtttttaataagacaggagaaaaactaaattttataaaggaatgaagtgaaatgtatttctgtgatatgaagataataaagtgttagttcaagcaagccttacctttcaaattggtagattaacaaatagcctgaaacggtgatcttctgttctttttttgtctggttcatttttcctgtaaaccgttgtttatttttcacagagtattctatccttactttttgaatgtatgtgtatgtgtgttttctgaatttaagacttttctttataatctgttacctacttttaggtcttttttcccccataactgttttgaagtagacatgccgaatatatgttttcattttaaagtaatgcattctgttaaagatgatcacatcagtgccctttaaagtactgttctcattaatatgaaccattgaatacttcccatttgtctaaaggatggaaggcttagtcaccttgaaaagatgctgcctttttttcttcgtaagccttcaaatactttaagaaaaaagccagtaaaatatcagttaaatgtatttatggctttaaaaatattgtaacagtgtctgaatcaaactttagtaaaatctctttgggttatatctgagaagcttttattgaagactttgaacaaaattgtgtttttgacagttttaaattataggctaactagcctgggaaaaaaggatagtgtctctctgttctttcataggaaatgttgaatcagacccctactgggaaaagaaatttaatgcatatctcactatcttactgtccatgaatataatagaaatgaattcaaaatgcagttttatttttgcaaatgggatgagtcgatagatgcacctcatatttttgaacacctagggttcaacaaatttactggtggtgctcttgcattttaacaaaatttattcttcagtagaagggggcagagaacactagattcttattcaagcattctatcgagctctgcattcatggctgtgtctaaagggcatgtcagcctttgattctctctgagaggtaattatccttttcctgtcacggaacaacaaatgatagctaactacagaggcacatttgcagtagtcacattcatcaactgcagaaaaaaaaattcaatttaattgtgcaacacagctgcacatgggcttttgagcatttctgttgttctccctgtctcgctattcctccctccagatctattttttaaactttttttctggttattttttcccctttttgtctcttcttccatttttactctctgtactttcttgttaaagtaattttcctttgtggctctcattctttttcccccattgaaggctatgaatgtagaaaattatcacaattactcatataattgagcctctttgtagcaagtgcaactccagtagcctttctccatcatgaaaatggtttcattatagggtttttcatattctctgacaccatctacacagaggaacaggcgtgcagatgagatgtgctaggaacaggctagatcagtaaggtcacagtaggaataattagctctgctatggaaagagcatctaggccttttactgctacataaatgtactgtccatggcttttagtcacaaaaaaaacttactaacaaatggagctcccgcctactactttgaaaaaaagatttgtatcaacactacaattttccatcattaagactaataacacagagcctagtatacatcaaggggaataaaaagaaaaatctcacattcaagtggcggctgggtgctgacctttgttccctttttttgtgtacgacttaactctttacaaaaaagagccacacgccacaccaacatgcaggtgaactccagctagtactagcaaagcatagcattcagttggaaaatttgataaatctccatgcaggataatgcatttcattacatattcactacattaattctagctacattaaaaaaaaaagaagaagaagaagaagagtagaattgaaagtgacattggattttagctatctggatacaaaggtcagttttcacagagtatgaatttgcatgtacaagcttttttgaaaaccagatcagtcagtcccaacaactgcacttaaaaaaactatgtggaaaataacagacaatgaactttttacttgtaccctaatacatttcattatttagatggtttatgtctgccgctagaaaggaaactggccccgattctaacaaatatttgttctgatgtgttaaagcagtgtttctggacacctattatcttgccttttcttattctggcaaaatcttaggggaataagtaaacaaaccatatttacctttaagccaaaagtacttgaaatcattacagaccaaaggtttacaaacatctttcaactcggtcttgtttattttaagatattcaccatcttttgcgtagcctctctctactgatacactaggaaaagaacaagcaacttgtattagtatcatgttatcaaaaaccttgagatctctacaggaaattttggaattctcctctgaaacctaaagaagataatgtctttgaggaagtatcagctaaaatgttttaatggaaagagttctctctgggcccttttgcttttgtgaggaatgtctagtaatctttaggtcatagtgttactagactcactgtatctccatttgctttaaaatatttctaaatctgtatttttataattatctctagattatacaatctgtacatatgagtatattgtgaatgtgtagattcatgcatcatgaatatgtgacagttcaatcaaaaataatttaaacttgtaaatgtcatgatgaaagtatcaataaatggtttttaatgtttaattcataactatatgttttgatattaatttggaacaatataaagcagatttttaaaaaataatctctttctattagattacgcacatttaaacaataagtggctcaggcaaaataagtcattttaatgtcatctgtgatggatttttcttgacagctactgtaaattacaattatactgcttctctctgcacatgaaagtaagcattgcaataaattatcttttatttcaatccatcatgtctgcttttcagaaacagaaaacctcaaataaaagttcagcactattgtaagaaaaatacagtaatttgtgatctggtttgaaacaaaaaaaatctactacttttttggaaaacagttgttggctttcaaaaatattactaattgtacttaaacattccttttcattagaaggaatccctggatttgtgcatttcttcattcataactactgcctaaaataaatatctagaaagagtaaagaaaaatttcataacttatgaaataacatgccatttgagatcatttattagagatgtgactatttggagattagtgctgtttataggattaatgtaaaattggcaataaatctattttcatgtgcatttttatttctttataacagcatgtacgtaaacatagtactcctctgccctcttggggaatgtatttttagtcaaaaaactagttgaaaagtattaagaaatttaatttacctaggtgacatttaaattgagtataactgcctcatgaaaaggaattaaactgaagaaaatggtcacaagatgaaattccttaaaagaggtatctttttcatgtataaactgtaactacaacatgaattgtaatcagacagtataataggaaagtaagttcataaacaacctttatgtatcctcctctccctctccaaatattccatataaaaggcctcaaatcacaagtgtgcttgggttcatgggcagatgtcacactgtcttaaaggatttttagttagagaaaatcagaagatctactaccaggagaattcttttcagtaggtttcagcagagcgaagacagattttatccgtgaaatgtccagggcaagaaaactcttgtgcacagaaaagggttatggcctgtggtgactggtgtttgggagcacttcggtgcttctgcctgccctgctgtttccattttccccagcatgccagtcaagagctgcagacatactccaactccccatgccacagttagggttaccagtactttctttcaaattagaggagtgaaatttgctactactggtcacttggattgtctctgtgaatttggacttaaaccctacaatcaggtaaataatcttgtgctccccatttattccaaaataatagaaagggaatgcttttaaacagtaattaggaatattaatgagatcctatctgacttagttccagtaagtgctaaaaaccacctaccaatccagaaggaaaatactctgcaaagcaaacaggagtgtatactcagctcctgagagtcaggcattaagatgtgctcaagcagggaactgggggaaatttggcctgttcttttcctctttccacctggctgtgaaatcctctaacctttgcatccatgacacacagattctatgatactcctggagccagaagttccagcaggacccacggagtaaattgttgtaggagaatgctcttagatatctttagccacctagtaattgcacagcttcttttatgcagaggaacgagaggtatgatggggggagggaccctaagtgttttttcagagtgggctttcttcctctcctctcatcggaaattaaaatgaagattgccattgtaacacacatttaagatgtagccgtgatgcctgccaatcagccggatcctctaaaaacaaaaaaaaaagaacctagatttttttttttagaagagaaaatagaatagtttatattgagtgttcttagaatcattgaggtttgttgggattgaactaacataatttataggtttagggagaaactgttcctgtaaaaaaaaaaaaatctagattattatgtcctatttaattatctttcttccaccctgtattcactcttcatcctcagtgtttattcagaaactgtgtggcacaaataaaaacaccttgggaaacaccaaatagaaatacttgcccaccaaagatccacagaaataaccataaagtacaacgtaagagataaaaaccttgacttaccgttcctgtcctcaacatatgtatagcttacctatttctgcactaacagttacatcaaaattaaatctgaataagaggctgcccatctgctggttatagtgacatccaggtctaagtgaagctgtcttacaagtctggggatggttaaaattatttagaaaaatgtataaacatgaatggccataaagatgctggctgaaagcctgtgggttcatgttaaactaaacttagagtctgttagagactctagtttgagatctagaaacttagttctgttaataattgaaatagtagtcctgtaaatcccaatctagtgttagggttaggggcattttgccctttgtccacatgaaaatataaattcttaatagtatatatgttcttgtttgtctgatgctccccaaaataaacatgttagctgatttcaaggactacttttcaatcttgtagatgaagattttagaattggagtctgtgtgcttggtttcagatggaatgtaaaacatttgcatgtaactaatgtagtgcatgcaatgtacttctccacatacatgtaatgaagtaactaatgaagcactaagaattgggaatcacaatactagcttatcttaagcatcctagtgattaaaaagcattctttatgaattttgttaatggtgcaggtcttgaatggaactctcaaatgatctcacggttttggagtatttcaagaatattgacaaagtagattgagcttttcgtgtgagtgtgcctgttggtaaaatgtgtaacactttgaaatagagcagaaaaagggaaccatagaagtagaaagtcatatttctatattgtaatttgttttatatttggttccccaatcaggagtaatttatagtctttttgtgaaacctcaaaaaagccaggcaggtttttatgacctgcattatatgcacatatatcccggttatgtatggcaatcactatgtgtgtatacacactcacttgttgtctaaaagtggctttgtttgaatgctgtacaaaggtaaatgactcaaacgactgtgttggatagatatgtaccttctctcttcatatatccaaagacagtggttgcaggcaacagcaaaaattaaaattattacagcataatgaaaacacatgaatgttattatctgactctaaatattactgactttttctttttcagagaatattttaaagtgactttgttttatcttagtatgcctgaaaaacttatctaatttaattaaatattttttggtcacttttaaagccacataactcatcagaatggttttcaagtctgtccacattttgtgggacatggaataggatcttactttcatggacatccagaaatttggcatcatggtaagaaagttcatttggaggctgtttcttgatcagagatcaagatgtggcagctttgaccctgaagctcttcctctgactttgaatctgcattatcaaccttgtgtttgtgtgtgtgtttatgtgcagggggcaggggaggggggtctgcttaattttaaccgggacattactgtgttactggattagagcccagctgtttcaatcccaaaataaggtttattttgctctctgtcttctcctgaagggtgcatggctggaaggcacaagggatatttgtgtagaaaaagttactgaaaacaaaacgccactgcatcagtgtcccagcagcatgcacatatgactgtttctgtttttctttttctacccccttttctagctgctgactgttgtggttaaacttcattacatcctacacagcgttgacagctgatgtatttagcagcatgtactccttcgtgatttctagattatgcccacccttgtcttccttccccagaatctcttgtttttcactgcctgggtgtgcaccctatagtgagaagacaggggtgggcccagaggggtgggaggatttggattgaggtaggaggcagctcagtggagcaccctcaaggcaggtccacacctggacggggatcaaaggaaagttggtcctggggccttgacctgtgcccctatggacttgattggtccatagaaggactactctttcggacccatgccctcgaggatcgctggacacccagcaggtccaaaccctctttggaccaaagagcccccacctaggcagctcaagaggttcaggtgagagtgcagaaacggcttgtcagccttgtgccctacctggtgccaatgtctggagtgaagctatttgaagtcaggcccctgctccccacaacctgcaccaaaggaggcttccctcctttgcatccttccccaggacttctttgagtgaggggtgtgggcaaggcccaggacccagtagtaggctgggagacctagtagcctgggggacagggagagggggcgaggaagcctgacgtgtctgaaacaaccaggctgcccctgccaggccttggaaaactcttctgggggagtcttgacccagagcacagataatgcaaagactcaggcccagtagccccgtgtttaactcctggtcactatccaggactccagaaatctccacccttccttctctaaaagaagagaaataaaacgaccaagttttttaaaggggcctgacccctgtaatctgttttttttttctgtcctccccatttcctattctcaccccccatgttttttgttttgcagcaaacgacagtgatctacccatggaggagggcatggcattcactataggtaaattgagctcctcttccgagtgagtgcgtagctcctggtggaagcttttgccactggcctaggcccggcagtccggtgaaggaccaataaagccaatcagtgtaatgaaataattcggatgcactggaaatctgattaaataatatcctcaagccccatcttcctaaatcagatacttaccgacacatttaggagaaggcagccatccaacctctaattctgttaccagcataatgtggtgttgggttttttgttttgttttgttttttcattaacacccagtaactagacacgattatgtcccttgctccctgtcagcaagtggcatgtgctctctggtggcccgttcctggctgatcctgtgattggtatcaccaccaaattccagtcacctagggccgtaaagacatcctgtttctgactgtgggacttaatggagaagcaattagagtgaaataagaaaattgttatttgctgatgaatgaacatctcgagcatgtttttaaaatttaaatatttttttaaaaattggtatttataagagggactggtgtttgggtggttattatccacggggtcctaattaaagcttgattaaaatgcccttctttctctaaaaaattacgaactaggcaacttcatacattttgaatggcgcagtgtttcctcttccaactgtttagtttgtagtatactatgtaagcaacatcaattatcaacccttgcaagatgacaacatgagcctgtgggggaagcacttgaggggagggaggagaaacttctcttttttaataatcagccggaaacaatgtttaacaagaatctgatgaggtcactgcagtaaatatttttcctcttacagagccaatcatcacggagggatcccctgaatttaaagtcctggaggatgcatggactgtggtctccctagacaatcaaaggtgtttgctttctgctctgttgcttttaaattgtatgggaaaggaagattggtccgacggcgcgcttgtggcccggccggagcttgcgtgcgcgttctgacggctgggtgctgtgttacaggtcggcgcagttcgagcacacggttctgatcacgtcgaggggcgcgcagatcctgaccaaactaccccatgaggcctgaggagccgcccgaaggtcgcggtgacctggtgcctttttaaataaattgctgaaatttggctggagaacttttagaagaaacagggaaatgaccggtggtgcggtaacctgcgtggctcctgatagcgtttggaagaacgcgggggagactgaagagcaactgggaactcggatctgaagccctgctggggtcgcgcggctttggaaaaacaaatcctggccctggactcggtttcccagcgcggtcaacgcatctggaggggactggaggaaacccccttgttggaagagattccaagagaagcacggttttctctttcccttgccctgactgttggagtaaaaaacctcttaaatccattgtatcagaggtccttacctctctgacagttacagtgatctttgtatctgaactttgcacgtctgccgaaaaatccgaacctgttgactgggatttttaagaatccgtttctcccttttgtgtattccatattggccggccccaaggatgctcgcagaagccagcccccaaccccagcccttccgtatctttcccctccatcgcggctttgcgatgaaagattagcccgcgaacagaggcattgattacaaacatgtccttggcagtggactctgggcctggccattcttcaggtttctgtcaatccagaaacgcgactttcctggacccctgcggctcttcctcccccgcccacatccagccctccaaggccagtccagaggtgaagtttgaggccctccccccacccaccccacacgcacgcacgcacgctagaccgtttgctgcactaggaattcgagcttgggccccactcgcccaggtgtgaacagtggctgattagtgggcggtctagtctctaaaatgacccctccccagactggcccttctcgcatcgggacccgcgcttgcacgctgcaggagccgcaaacgtcagctgttctggaaaccgagagggtcccagagagaggagatacgggcgcatttgagagcaagggcctacttggccgggactgaagcttgcgagttgagctccagttcggccggcagttccatcccgcttcaggaacaggaatccaagggcccacgctctgtctgccaagggccattcctgcccggagcaccctcctttcccttgcgcttgctctccggtacctgttcctcacctgagctcaagggcagggagaggccgggcctctggcagtccacgaaggaagccgtctgccttcggttatgattttaggaacaagtccaacgagggtgttcaagcagttaatggttgtgctaactcttgtttctactgaagcgggttttgcaaagctgacatcccttaaagataacttgggctttcggaagcggcaaggaaatggcacctgtagttgccaggacaggtggtgtcctcggccaggactaagagccagctcatctttgtaacattcataatacgggaaactgaggaccaggtggctcggaaaagagatgagttccagcttttacctaacacagggttctctcgtcgtcccccaacccctccagctcggcttctttgtgtccagggttgtagatttttggatagaggtgtttctgattctagtgagtctgagaactggaaaagaccaaggaggggttgatgatttacaaggtccatagaaaaactttttgtgtggtcggaagttggccaagcagaggcccacagcctgatgctactgccccccacccccccaaagatctgaattccctaaagatcaagagggttcagctggccttgggagatgtttgctggagaatgacttcagttttctcctaaggcaatcagattgcaaccattagcattgtatcttatctgcaaatcagtttactccgaggttccccaaggatagttttattaggaccacaggactttactaaccactgaggtaacacgctgcttgtgca
